United States Patent Application Publication US 2021/0199660 A1 - sequence listing, part 72

SEQ ID NO: 1039925 - DNA, 120 bp, Artificial Sequence
  ENSG00000286230_12 (sequence is synthesized)
gctaagaaaaacatgcacggacatctgtgtagctggagtaaagataggagaagaggctggtgaggtgggcagagagcaaatctgaaagaactccaatctcaagtacgtggcaaggccggg

SEQ ID NO: 1039926 - DNA, 83 bp, Artificial Sequence
  ENSG00000286230_13 (sequence is synthesized)
gcagtgagccaaaaactccatctcaaaaatttaataataataaaataaaaaaatagaagtgtgtggcacctcccgtcctctct

SEQ ID NO: 1039927 - DNA, 120 bp, Artificial Sequence
  ENSG00000286230_14 (sequence is synthesized)
aataaaaaaatagaagtgtgtggcacctcccgtcctctctctcttgctcctgctttcgacatgttatgtgcctgctccctcttcaccttccgccatgagtggaaaagctccctgaggcct

SEQ ID NO: 1039928 - DNA, 120 bp, Artificial Sequence
  ENSG00000286233_0 (sequence is synthesized)
catatgggagctccctcagcaaaatttcaaatggagtggggggctggaaggtgtggggggacaggtgccgggagagatacacagagggagagagacagaaagagcagactgtagcttcaa

SEQ ID NO: 1039929 - DNA, 120 bp, Artificial Sequence
  ENSG00000286233_1 (sequence is synthesized)
gagtgtgcagtggagggggctactgggtgcaagggatagtctaggtttgcatgcatgaatatgagagaccaaacccttgcaccgtgggaacaaaatctatcactgctatttggaagtcta

SEQ ID NO: 1039930 - DNA, 120 bp, Artificial Sequence
  ENSG00000286233_2 (sequence is synthesized)
aacagcatctttaaagtttcctgatgtgattgttcacaatcaaagggactgtaaatttcatgcttgtccataacacatggagggacccagccaatcttctgatattgctgttcaaagtca

SEQ ID NO: 1039931 - DNA, 120 bp, Artificial Sequence
  ENSG00000286233_3 (sequence is synthesized)
tcactggctgcatcagagtcaggaaagaggagtcaaacagaagcagatcagatctggaactctgcttgagaaggctcgctataatccccccatcactggtggttgttcatggaatgcaga

SEQ ID NO: 1039932 - DNA, 120 bp, Artificial Sequence
  ENSG00000286233_4 (sequence is synthesized)
atgaaggacaagaagcctaatagcccacgccagagactgcatccttgagctggaaaatgtatattatatgagcagctcccttccacggctcccctccactagcgttgactattcccccac

SEQ ID NO: 1039933 - DNA, 120 bp, Artificial Sequence
  ENSG00000286233_5 (sequence is synthesized)
agttaatgttcccctcagagagtttagcctgctttctctcctattaaaagaaatggtatttgagaccctgctgggggcaaaggtctgattttctctgatcattccttgtatttgtagata

SEQ ID NO: 1039934 - DNA, 120 bp, Artificial Sequence
  ENSG00000286233_6 (sequence is synthesized)
acgttgatgaaatagaagaatcatccccattttgcagatcggataactaaaaataactgtgtgactataagcaagggactccatgcttcattaagggtctctcccttcgctgtttttttt

SEQ ID NO: 1039935 - DNA, 120 bp, Artificial Sequence
  ENSG00000286233_7 (sequence is synthesized)
ttacattcctctgtctctatttctccctacattatcatgcttaagacaataatatgttttacagtttcaaatagctagaagaaaaatactgaatgtttctaataaaagaaattataaatg

SEQ ID NO: 1039936 - DNA, 120 bp, Artificial Sequence
  ENSG00000277382_0 (sequence is synthesized)
acagtgtaggggctgggatgagtggatgagggaaatccgactcctctcagatatccacaggcaggacaaggtggccaaggccgagctgatggacagcatggcgggaggcctggggcagag

SEQ ID NO: 1039937 - DNA, 120 bp, Artificial Sequence
  ENSG00000277382_1 (sequence is synthesized)
ttatcctgcatcttcactccatccaggcccagcttacctacaacccgggggagtgggggtaggagggtgttagatgtgtagcttgaaaacgacaataaaaaggactgctgggatcgggtg

SEQ ID NO: 1039938 - DNA, 120 bp, Artificial Sequence
  ENSG00000286234_0 (sequence is synthesized)
tggacgaccccggaagctgcagtgccagcggcggcgcggcagggggcgcggttacccgtggtttttcgcgttggacgacgggctctgagggccaagttcttgtcacgaatttagtttgtt

SEQ ID NO: 1039939 - DNA, 120 bp, Artificial Sequence
  ENSG00000286234_1 (sequence is synthesized)
tcagagcggcaggactcgtagctagagaacgaggacccacgacgcgtacgcgttacagtcctgtttccctagaaacggagctgccggcgcggaggtggctttgagattctgcgaaagacc

SEQ ID NO: 1039940 - DNA, 120 bp, Artificial Sequence
  ENSG00000286234_2 (sequence is synthesized)
tgactgctcttcaacaattattgtgttgcaccctcccaggcgcccagtccaaaccccgtcagaataaccacccgggacagcggtggtcgaagtaactacgcctaacttttcgctttccat

SEQ ID NO: 1039941 - DNA, 120 bp, Artificial Sequence
  ENSG00000286234_3 (sequence is synthesized)
cgtgtcccctccataaaaacactgctgggcccccggaatccaaaggcgaaggaggcacactccctgccttagacttgttgagagttttataggggcagtgcataacgtacatgatggtgt

SEQ ID NO: 1039942 - DNA, 120 bp, Artificial Sequence
  ENSG00000286234_4 (sequence is synthesized)
atgacgattcggatggtagtacgagtcataaactcaaattccaacagcatccagccaggacttttaaaattccttgcaacgcaagtctactggtgacaaattccctcaaattttgtttgc

SEQ ID NO: 1039943 - DNA, 120 bp, Artificial Sequence
  ENSG00000286234_5 (sequence is synthesized)
tcctcctgccatggtctccaaaagtgctaggattacagggaccctgggtcatggctgaagcagtgaggaatagtaaaaagagtgctggaaatccggagcctcagattttagtctactgat

SEQ ID NO: 1039944 - DNA, 120 bp, Artificial Sequence
  ENSG00000286234_6 (sequence is synthesized)
gagactgactggctgtgttttccagttaagcttggtcacatctgtgggcctcagctttctcagccatagaatcatgagatggagtcttactctgtcggctcactgcaacctccacctccg

SEQ ID NO: 1039945 - DNA, 73 bp, Artificial Sequence
  ENSG00000286234_7 (sequence is synthesized)
ggagtcttactctgtcggctcactgcaacctccacctccggagttaactgacaccatgcctggctaatctttg

SEQ ID NO: 1039946 - DNA, 87 bp, Artificial Sequence
  ENSG00000286234_8 (sequence is synthesized)
ctcccaaagtgccatattttattttttcttgctatggagtctcactctatcacccaggtgggagtgcagtggcgtgatcttggctca

SEQ ID NO: 1039947 - DNA, 71 bp, Artificial Sequence
  ENSG00000286234_9 (sequence is synthesized)
cagccaatattttattttttcttgctatggagtctcactctatcacccaggtctcaaatgatcctctatcc

SEQ ID NO: 1039948 - DNA, 78 bp, Artificial Sequence
  ENSG00000286236_0 (sequence is synthesized)
actcactaccacaagaccatcatggaactgcccccgtgattcaattaccgccacctggtgaaaagtggtcctgttctt

SEQ ID NO: 1039949 - DNA, 120 bp, Artificial Sequence
  ENSG00000286236_1 (sequence is synthesized)
cccatggacactatccccagagttttattttggacttccagattcgagcaagtctagaaatgtttattggtggtgaatgtcccataaacaccaagaatcctcagcttctgaagaccccag

SEQ ID NO: 1039950 - DNA, 120 bp, Artificial Sequence
  ENSG00000286236_2 (sequence is synthesized)
tacacaagggtgcaattggaactgagaatccacaatggcaacttccaatgaagaaaagaaaaatggggaggatgcagcaggcactgttccagtgcaattaaccaaggccagtgggaagga

SEQ ID NO: 1039951 - DNA, 120 bp, Artificial Sequence
  ENSG00000286236_3 (sequence is synthesized)
aagtaagactcctctgtcctggcagtggaggaaggctgttaactagccagtctagaagccgtggttctcctgtttcaaggtcatatgctgttcttggctccaggtttctccttcttgcgt

SEQ ID NO: 1039952 - DNA, 120 bp, Artificial Sequence
  ENSG00000286236_4 (sequence is synthesized)
aaagcatttataggagtcaagaatgcaaatgaactaagtaaacttctctgttttggaaatgttggaaatgtaaataactttaggggaaacaggagggaaagggagaagcggtggagtgag

SEQ ID NO: 1039953 - DNA, 120 bp, Artificial Sequence
  ENSG00000286236_5 (sequence is synthesized)
tgaggacgctgataacaggactgcctcatattcgtgtagagttctgtcttttgccagtgcatccggaaagtatgttccgcaccgaaggaccatttctgagtggtcatttcctgtaagcaa

SEQ ID NO: 1039954 - DNA, 120 bp, Artificial Sequence
  ENSG00000286236_6 (sequence is synthesized)
agtaaagggctgagtacctttgtgggttgatttatttcaaaacaaaggcgtgaggcaacagttagccatggtactttccttaaagcagaagctcaaaaccagaaattgatgaaaaagtaa

SEQ ID NO: 1039955 - DNA, 120 bp, Artificial Sequence
  ENSG00000286236_7 (sequence is synthesized)
gccacatgagtatttctaaatattgtgtgcttgaggatgggtgtttactggacatggtctggttcatgtaataagggttggagataattttgatttgacattaaaacttctcacttgaca

SEQ ID NO: 1039956 - DNA, 120 bp, Artificial Sequence
  ENSG00000286238_0 (sequence is synthesized)
aggaaatgcaaatcagaagaaacagatgctatttatttgaagcttgttagagaaaggaagttggctatcatcacctgcatttgatacagactcagaggaagggagtgggaaagctttaga

SEQ ID NO: 1039957 - DNA, 120 bp, Artificial Sequence
  ENSG00000286238_1 (sequence is synthesized)
gtgaacagttaaaaacctccagcactgtgcaatgatcacctttcaagtaccacaagataaaggcaagagaaaactctaccacaagaacctaaagtatatactgggatgccttccagaaaa

SEQ ID NO: 1039958 - DNA, 120 bp, Artificial Sequence
  ENSG00000286238_2 (sequence is synthesized)
tgaaagtggagtcctttccacatatatatggtttatggtattaagaaatgctatctctgagcccagtccttgaacacagattctgggaactagaaccatggatgtaatctacaagacatt

SEQ ID NO: 1039959 - DNA, 120 bp, Artificial Sequence
  ENSG00000286238_3 (sequence is synthesized)
caataaagatctgtaatgtgctcatcaatagaacactgtgactgcagattggctcagaccaaaacattggctttccttgagtcttgagactgctgacttttagagtgaaacttacaccac

SEQ ID NO: 1039960 - DNA, 120 bp, Artificial Sequence
  ENSG00000286238_4 (sequence is synthesized)
cagctctcctggttctcaggcctcctgactcagattggaactacacattggctctctctggccactgcttcagcactgactgtacatcctgggactcctcagcctccgtattcaaagtgg

SEQ ID NO: 1039961 - DNA, 120 bp, Artificial Sequence
  ENSG00000286238_5 (sequence is synthesized)
gttccacatctgtggattcaaccaactgtgtatcaaaaatatttttaatttaaaaaaaatagcatctgtaattgaacatgtacagacttttttccttgccataattctctaaacaataca

SEQ ID NO: 1039962 - DNA, 120 bp, Artificial Sequence
  ENSG00000286238_6 (sequence is synthesized)
aacaactatttacataccatttaaattgcattacatagcatttaaattatattaggtattataagtaatctaaagataatttaaagtatacgagaggatgtgcatagatgatatgcaaat

SEQ ID NO: 1039963 - DNA, 120 bp, Artificial Sequence
  ENSG00000286238_7 (sequence is synthesized)
aaatactaatacactttacgtcagggacttgagcatcttcaaatttcagtatccatggggtcctggaaccatggccttattggcaccaaggaataaatgtttaaatatatacacattgta

SEQ ID NO: 1039964 - DNA, 120 bp, Artificial Sequence
  ENSG00000286238_8 (sequence is synthesized)
ttagttctgtttctctggagaaccctgaccactatagctgcactgctgaaatatcttactctttttttttttttaaccctcaatcacttttttaatatattcttttctctgtagccttaa

SEQ ID NO: 1039965 - DNA, 120 bp, Artificial Sequence
  ENSG00000286238_9 (sequence is synthesized)
tgtggtcagaatcttaatgtgcccctgttgtatctgttcaataattaagtgttgaaggattcaaagcctttgattatctgacttttccatctctcttacttcactggtcactattctcta

SEQ ID NO: 1039966 - DNA, 120 bp, Artificial Sequence
  ENSG00000286238_10 (sequence is synthesized)
caccctgctctgacgttgcacattccaatgtttgattagctcacacttcctctgaactctcaagctttaaggatgttgttttatctgtctgaaattctctatacactcctgttccctaca

SEQ ID NO: 1039967 - DNA, 120 bp, Artificial Sequence
  ENSG00000286238_11 (sequence is synthesized)
gttttttccatgtaactcaaacttcaggtgtgcttattccaaagtttcctttgttatgttctgtcataatttctttttataactttttaaatgtcatcaaatttataaattactttttgt

SEQ ID NO: 1039968 - DNA, 120 bp, Artificial Sequence
  ENSG00000286238_12 (sequence is synthesized)
ctccttcacactaaacttgtgggtaaatgactttttctctctcagtacttattatgcctttggatgctagaacagaggaattaatcaatatatacattgaattaaaatgaatgttatgag

SEQ ID NO: 1039969 - DNA, 120 bp, Artificial Sequence
  ENSG00000286238_13 (sequence is synthesized)
atattaatttttacaagtgaatttgattgacaatgttctcctagaaaatagagatgattaagagatcctctagttaccagtggctggagtattgtggagatgttcttcaaagaaaattaa

SEQ ID NO: 1039970 - DNA, 120 bp, Artificial Sequence
  ENSG00000286238_14 (sequence is synthesized)
attttcattaaataagaggaatctgttcaagtgatctgttgtacaacatggtgactatagttaataacaatgtattgtatttttgaaaatcccttagagagtaaactttgtgttctcacc

SEQ ID NO: 1039971 - DNA, 120 bp, Artificial Sequence
  ENSG00000286238_15 (sequence is synthesized)
caccacaaaaaattatacatatgtgaggtaatgaatatgttaattagctcaattgagacatttcactatgtatacatatatacataacatgttatacataagtataagcaatgttttaat

SEQ ID NO: 1039972 - DNA, 120 bp, Artificial Sequence
  ENSG00000286238_16 (sequence is synthesized)
aattaattcatttaagaaattaaaatcaaaaacataaatttttaaaagaaacccttaattattcagtgtccaggaaagagcttaccacaactaaccatgcttcacatatgacttaaaaaa

SEQ ID NO: 1039973 - DNA, 120 bp, Artificial Sequence
  ENSG00000286238_17 (sequence is synthesized)
atactcaaccatgtccttcttacttacctttgttagggccagattaagacattccaaatccccgttctttgtcccgtaaatggtaactgattagacgaactcctcgtatccactagtcaa

SEQ ID NO: 1039974 - DNA, 120 bp, Artificial Sequence
  ENSG00000286238_18 (sequence is synthesized)
tttgtacaaaatacctgctttctggaaatgatcaaactacggttaaaattctctcctttcccctggctcctgaaatttgatcctgaaatgcctagtcagagctagcatatagcccttcct

SEQ ID NO: 1039975 - DNA, 120 bp, Artificial Sequence
  ENSG00000286238_19 (sequence is synthesized)
taatggcccctctctagaataagctggcctcagggtaaaacattttctgatttactgtacaatcacactgctctccctctggaacgtcctcttacctggttctttctaggcttatttgct

SEQ ID NO: 1039976 - DNA, 120 bp, Artificial Sequence
  ENSG00000286238_20 (sequence is synthesized)
cttcctcataaataaaaagcctctttctgcttaaactttgagatgcacatagatcttaggttcagagcattccccctgttgcaattgtcccttctctcctcttgcaataatattttcaaa

SEQ ID NO: 1039977 - DNA, 120 bp, Artificial Sequence
  ENSG00000227602_0 (sequence is synthesized)
tacctacagcattgtacaataacaactagaaaaggcagtatacttcactgaagcttgtctggtaacatcacttctgtgttataatggaaggttttttgtgatgtatgaaacttgtgtttt

SEQ ID NO: 1039978 - DNA, 120 bp, Artificial Sequence
  ENSG00000227602_1 (sequence is synthesized)
tattgcagtgttcaatcctagcttttatttttattcttaaaacattgttttgctttcgattttatgtaccttagttctgagttagacctgcagatgcgtacagatagttcatatttatgt

SEQ ID NO: 1039979 - DNA, 120 bp, Artificial Sequence
  ENSG00000227606_0 (sequence is synthesized)
aaaggaggatgttgctgatctcagtacaagcaatgttagagaaaggggaagatggaagtggacgaggaccagtgagtggaaggtgacaaatggaagcaaagaaacccatccagaccattg

SEQ ID NO: 1039980 - DNA, 120 bp, Artificial Sequence
  ENSG00000227606_1 (sequence is synthesized)
aagatgcttgagcgagaagaaagaggcggtggagggaatggaagcccgaggaagtcatttgttgcaataggatgcctcagagcacgtgtagggtgcggggcagagcccatgcagaggggc

SEQ ID NO: 1039981 - DNA, 120 bp, Artificial Sequence
  ENSG00000227606_2 (sequence is synthesized)
caggtggccccactctccgtcaccctgaggaatatgtggtcagagttaaagctcagtctgtttctgggatcagtattttgtcatggcagccctagcaaactactacagggactgtgaggg

SEQ ID NO: 1039982 - DNA, 120 bp, Artificial Sequence
  ENSG00000227606_3 (sequence is synthesized)
ttaagatgacaccaaacatcaaatgccactccctgttccaacactgagaccattccacagcctctgaatgacaagacaggccttcaaaatcaagaccacctggctagattctggatatta

SEQ ID NO: 1039983 - DNA, 120 bp, Artificial Sequence; identical to SEQ ID NO: 809461
  ENSG00000280961_0 (sequence is synthesized)

SEQ ID NO: 1039984 - DNA, 120 bp, Artificial Sequence; identical to SEQ ID NO: 809462
  ENSG00000280961_1 (sequence is synthesized)

SEQ ID NO: 1039985 - DNA, 66 bp, Artificial Sequence
  ENSG00000254339_0 (sequence is synthesized)
acctatgactacttgctacacgtgctggaaatctggcaactggaccaaggaatgcccgcagcccgg

SEQ ID NO: 1039986 - DNA, 120 bp, Artificial Sequence
  ENSG00000254339_1 (sequence is synthesized)
acttgctacacgtgctggaaatctggcaactggaccaaggaatgcccgcagcccgggattcctaagccgcatcccatctgtgtgggaccccacggaaaatcggactgttcaactcacctg

SEQ ID NO: 1039987 - DNA, 120 bp, Artificial Sequence
  ENSG00000254339_2 (sequence is synthesized)
gaatcctgttggagtgatttgttcttcggactttgtatcttaaatgaaatcttctcccttagaggccacataaactgatggtacaatctgcaactctaagcaaattcataggttatactt

SEQ ID NO: 1039988 - DNA, 120 bp, Artificial Sequence
  ENSG00000254339_3 (sequence is synthesized)
tttcttcttcatacttgacatttgaacctagcaagtttgaatagcctgtaatttgaaaactcccttgcacatctagcagatcaaggtagcttgttctgccttctggacaaatggtgccct

SEQ ID NO: 1039989 - DNA, 120 bp, Artificial Sequence
  ENSG00000254339_4 (sequence is synthesized)
taagtcagcttagggagactgttccgatatcaagattctgtttgaatactatatactctcagctgcttatttattcatatatatatgacacgtttatcatggaagtatttcaaaactatc

SEQ ID NO: 1039990 - DNA, 75 bp, Artificial Sequence
  ENSG00000254339_5 (sequence is synthesized)
atacgcgcatgaaaggaagattaagaaaaacaaaaaaatgtaaatttactggacactgaatatatactaagtact

SEQ ID NO: 1039991 - DNA, 120 bp, Artificial Sequence
  ENSG00000254339_6 (sequence is synthesized)
aaatgtaaatttactggacactgaatatatactaagtactgcttaagtgatttacatgtcaagattaaaatattttgctttactttaattatcatcatattcttcatccatctttcattt

SEQ ID NO: 1039992 - DNA, 120 bp, Artificial Sequence
  ENSG00000254339_7 (sequence is synthesized)
catcttcatcatgccatttctttctccttcccctgggcctgaaattttatcaagaagacacacttgctgtgtgacttgattaatttacttaagcatggtaagcctttgtataatatggaa

SEQ ID NO: 1039993 - DNA, 120 bp, Artificial Sequence
  ENSG00000254338_0 (sequence is synthesized)
ccatcctgctttccttttctttcttttcaacaaatattgatggagcacctcctcggtgccaggcgctgctgcagcctctaggaaatcaaccgtggaaacacacggaccctgccctcccgg

SEQ ID NO: 1039994 - DNA, 120 bp, Artificial Sequence
  ENSG00000254338_1 (sequence is synthesized)
ccgacggtggcagcgccgagagaaacaagcttggaggggaaggagagctacagaggctgcatggatgtgatggttggagtggaagctgacattgtgggccaggagaccctgggagtacag

SEQ ID NO: 1039995 - DNA, 120 bp, Artificial Sequence
  ENSG00000254338_2 (sequence is synthesized)
gccaagatgaaaagagcctcaatccagagcgttctgtgaagcagtcaccacggccaccctgggccatcagcttctggacttttacaacatagaaattaaatttccattgaatttgttgga

SEQ ID NO: 1039996 - DNA, 120 bp, Artificial Sequence
  ENSG00000254333_0 (sequence is synthesized)
tcccgtgatgccgcgtgggtgccggccagagaagagctccggaggccggggcggccggcgggcgtgcgaatgtcatctttcccaacaagttgttcccagcagaatcctctctcctggcac

SEQ ID NO: 1039997 - DNA, 120 bp, Artificial Sequence
  ENSG00000254333_1 (sequence is synthesized)
cagatgaagagcagccctgagaggtagacacagcggagatttttttcacccgcattgtacagaagagaaaatgaagctttgcccaacctgcaggagatcccctcaccttgcaaaagagcc

SEQ ID NO: 1039998 - DNA, 120 bp, Artificial Sequence
  ENSG00000254333_2 (sequence is synthesized)
aagctgtgggatcttcagtccctggaccatttagcttgactaagagaacaggaatggaggccaaaagatctacaaaatgctcacacagagaagatgacagcttctacaaataaatgtcaa

SEQ ID NO: 1039999 - DNA, 120 bp, Artificial Sequence
  ENSG00000254330_0 (sequence is synthesized)
ccttccatcttttctaccatgtgaagactcaatattcaaggtgccttttagaagcagagataccagacactgaacctgctgtcaccttgattttggactttccagcttctagaactttta

SEQ ID NO: 1040000 - DNA, 120 bp, Artificial Sequence
  ENSG00000254330_1 (sequence is synthesized)
tggtggaaggggaagcaaacacatccttcatcacagggcagcaggaaggagaagtgcagagcaaagagatggggttttgccatgttcctcaggctgttcttgaactcctggactcaaaag

SEQ ID NO: 1040001 - DNA, 120 bp, Artificial Sequence
  ENSG00000254330_2 (sequence is synthesized)
gagaagtgcagagcaaagagatggggttttgccatgttcctcaggctgttcttgaactcctggactcaaaagattcacctgccatggcctccaaaagtgctgggattataggtgtgagcc

SEQ ID NO: 1040002 - DNA, 120 bp, Artificial Sequence
  ENSG00000254330_3 (sequence is synthesized)
tgcatgctaaacccacgacttatgaccctattgtccaaatgagtggcaagcataacttctccattgtggtggtgaatgagaggatgaagagataatgatggcatatagaaagaaaagtgc

SEQ ID NO: 1040003 - DNA, 120 bp, Artificial Sequence
  ENSG00000254330_4 (sequence is synthesized)
agcaaacaaaaggataaccctgaagaaaaacttgagctgtttctctgctttgtctaatctcctgtcaggacatcatttattacccacaatattcacttgagaaaacaactttgagaaacc

SEQ ID NO: 1040004 - DNA, 120 bp, Artificial Sequence
  ENSG00000254330_5 (sequence is synthesized)
agcaaagaaaaagccaaaggatgaagatgaagtccttctatagttcaaatcgctcatgtctgtgatcttcaaaatgtgacattggacaatcaatttaaatgctcttttttaaaagataga

SEQ ID NO: 1040005 - DNA, 120 bp, Artificial Sequence
  ENSG00000260455_0 (sequence is synthesized)
ctagaatgagaatgcacagcaagcggcagacaatcacccggcattcggcatctctttcttttcacgcgctccctcgctccgcctttctccagctctgccttctcaggcagatacatcaga

SEQ ID NO: 1040006 - DNA, 120 bp, Artificial Sequence
  ENSG00000260455_1 (sequence is synthesized)
taccttgtttatccatcttcagctccactctgagggcgcagacgcacgattccgggatcgggtgcaccacggcgaagcccaggcgggagacggcaggagcagctcagatgaagaaactga

SEQ ID NO: 1040007 - DNA, 120 bp, Artificial Sequence
  ENSG00000260455_2 (sequence is synthesized)
aacccacagagatgaagtaacatcctcaagatcaaaaggtaacaaacgattgaggcaggatttggatattgctctacatgacgggaaagcctgtgctcttggaattacagtcatagtaca

SEQ ID NO: 1040008 - DNA, 120 bp, Artificial Sequence
  ENSG00000260455_3 (sequence is synthesized)
acagatcaagttcaaagcatcatctaagtcaaggaaaaccagtaaagaggtttggagagacaaacagggtcaactccaggcatttgggtcagcagaaacggcacgattgagcagcactgt

SEQ ID NO: 1040009 - DNA, 120 bp, Artificial Sequence
  ENSG00000260455_4 (sequence is synthesized)
gactataggatcatggatcagaggctgcttcctctttggttctgggcatcagcctcatgtccactcaaagtaagtggcccctctgattggaatcggaggtgcctgggtcatctcacagag

SEQ ID NO: 1040010 - DNA, 120 bp, Artificial Sequence
  ENSG00000260455_5 (sequence is synthesized)
ccaaacaaatacaattagctattgcaaagccttttgggaattattcccagtgtaaataaacacataaccatatagcaagagccttgataaagtccaaaaacatgcaaacttggagtatct

SEQ ID NO: 1040011 - DNA, 120 bp, Artificial Sequence
  ENSG00000260455_6 (sequence is synthesized)
aagagaaaagaccacaatgtaaatgaaaaaccaaataaactcgggcaaaccataggatagggccctgtctgtgatggcctgcatatgatgagccatagaaaaaggatggtgaattctgga

SEQ ID NO: 1040012 - DNA, 120 bp, Artificial Sequence
  ENSG00000260455_7 (sequence is synthesized)
taataagaaatgtcaatgagatgcaagaaccacctgttttatgtaaagctccaaataaccagatcacagtggacagccactcaaataatgccttcataatacagagtattattgagaata

SEQ ID NO: 1040013 - DNA, 120 bp, Artificial Sequence
  ENSG00000260455_8 (sequence is synthesized)
actcagttcacagagagcttaaggcagccaatatttgatagcctgtcagaaaaaaacagaacagtaattatagaaaagaatcatatcctcggaaaaacaaaaattaatcaaactaagttt

SEQ ID NO: 1040014 - DNA, 120 bp, Artificial Sequence
  ENSG00000260455_9 (sequence is synthesized)
gtaaagtctatcttacagacacattgtctggactggtcctctcaaaaatactgtttttttttaatgccaatttgtttagttaatgatttttgtcttattacttcaaaactggaaatatcc

SEQ ID NO: 1040015 - DNA, 120 bp, Artificial Sequence
  ENSG00000260455_10 (sequence is synthesized)
tatgactcataatatcttacaacctttctactttcttaaagaatctcaagtttataatcacaggggatcggattatttttcaaaaattaaatggtgatgtaatgatttctgtgtctattg

SEQ ID NO: 1040016 - DNA, 120 bp, Artificial Sequence
  ENSG00000260455_11 (sequence is synthesized)
tagaaaagtcaaccttattacagctgcaacaatggcattaagaaatatgagtaattccaatcaacttgagataatgtctaatcaaacacaaatacaactggtaaatttcattaaatagca

SEQ ID NO: 1040017 - DNA, 120 bp, Artificial Sequence
  ENSG00000260455_12 (sequence is synthesized)
tggagattaaattaaaacactattatgtaataaaaacctttagtggtactaaaattttagaatagttcagatatacagaaaaatttcaaagatacacagagttcccatttttttcctatt

SEQ ID NO: 1040018 - DNA, 120 bp, Artificial Sequence
  ENSG00000260455_13 (sequence is synthesized)
actaacctctcatatttgtcacaactaatgaatattcaatagagtattattaactaaagcctatacatttatttagatttccttagtttttagctaacattctttttctttgttccagga

SEQ ID NO: 1040019 - DNA, 120 bp, Artificial Sequence
  ENSG00000260455_14 (sequence is synthesized)
tcccatccgggccaccacattgaatttatttgtcattttaggtacctcttggctgtgagtttcttagactttccttgtttttggtgaccctgacagtttgagggagtactagtcagtcag

SEQ ID NO: 1040020 - DNA, 120 bp, Artificial Sequence
  ENSG00000260455_15 (sequence is synthesized)
ggtgaagtaccattctcaccaaattatattaaaggtacataccatcagcatgccttatactattgatgtgaactttgattgcctggctgtggtagtgtttgtcatgtttcttcactgtaa

SEQ ID NO: 1040021 - DNA, 120 bp, Artificial Sequence
  ENSG00000260455_16 (sequence is synthesized)
agttactcttctcatcacccacttttctgtactgtactctttggaagaaagtcactatatgcatcccaaatttaaggagtgggaagttatgctccacccatttgtaagcagaaaatctac

SEQ ID NO: 1040022 - DNA, 120 bp, Artificial Sequence
  ENSG00000260455_17 (sequence is synthesized)
ataatttgtttggcattcttctgcataggaaaatcatctcactctcccagttatttatttatttgatctttttttatatcagtatggactcatgggtatttcttttatactttgggttat

SEQ ID NO: 1040023 - DNA, 120 bp, Artificial Sequence
  ENSG00000260455_18 (sequence is synthesized)
aatccaatactaacacaataaagaaatttttaatggagatgcattcaaattcgttgctaaaatgggcctgacacctcttgaccttggctaaacagagattctggatggagcaaagcactg

SEQ ID NO: 1040024 - DNA, 120 bp, Artificial Sequence
  ENSG00000260455_19 (sequence is synthesized)
tgacgtcatgtggactttgaaggttaagaaactacggatcatcaggacatatttgctcttccatctcacagagaaaatggggatatacctcctcattccaggaaactttcttcctatatt

SEQ ID NO: 1040025 - DNA, 120 bp, Artificial Sequence
  ENSG00000260455_20 (sequence is synthesized)
tctaatatatccaggataaaattcaatatatatagtcagtagcttcaaagttaagcataatttgtttactagaattcttaaggcagatgttggatcattaactcattctcttagaaataa

SEQ ID NO: 1040026 - DNA, 120 bp, Artificial Sequence
  ENSG00000260455_21 (sequence is synthesized)
ctttggtgcttataagtaggcatcacataatctgatacactgatattatatatataatcgtgaaaaacatatcagattatatgatatcacataatctgatatatgtgatatataatcaga

SEQ ID NO: 1040027 - DNA, 120 bp, Artificial Sequence
  ENSG00000260455_22 (sequence is synthesized)
ttatgtggtatcatataatctgatatataaatgtttttcataattatacatatatttcaagtataattgtgaaaaacatttgccagtttaaagtttaatatgtagacagaataatgcctg

SEQ ID NO: 1040028 - DNA, 120 bp, Artificial Sequence
  ENSG00000260455_23 (sequence is synthesized)
gaggtatagggatataattgggaattagagtaataaaataaatattttaagtacttactacatattactcattaacacaaaagtaactttacgtataaaatgcatgacaagactccatta

SEQ ID NO: 1040029 - DNA, 120 bp, Artificial Sequence
  ENSG00000260455_24 (sequence is synthesized)
taaagaagtgtctgaaagctatagggcagaaaggtatagaacacagtatagactagaaggagataaagacaatcagaagattttattcattcatttattcaacaaaaatttacagagtac

SEQ ID NO: 1040030 - DNA, 120 bp, Artificial Sequence
  ENSG00000260455_25 (sequence is synthesized)
ctccaattatcagcagctgtgctgaagattaggtatattacctacacagttacaaattttgctttcatgtagtctgcaggaagagagacattaatcaaagaatggcactattgacacttg

SEQ ID NO: 1040031 - DNA, 120 bp, Artificial Sequence
  ENSG00000260455_26 (sequence is synthesized)
tgcaggaaagggttacgtcaacaggcctgggctgctcaaaccttgcgtattcccagagtctcaagactggtcttggcctggctcctgggaagattacttctgagcccttggctgagatag

SEQ ID NO: 1040032 - DNA, 120 bp, Artificial Sequence
  ENSG00000260455_27 (sequence is synthesized)
gagtttatgccaacagtgtgatttatggcaaacacctgtttttgtatgcctgaggctttggatcatgctgtaccaatttgatctgaggcctgaagactggtagctaaggtgctgcatgcc

SEQ ID NO: 1040033 - DNA, 120 bp, Artificial Sequence
  ENSG00000260455_28 (sequence is synthesized)
tacatgactgacctccagtaaaaaccctggacacatgcctcaagtgagtttcgttggttggcaacactttacatatgttgtcacacgttgttgctgagaaaattaagtgtactccatgta

SEQ ID NO: 1040034 - DNA, 120 bp, Artificial Sequence
  ENSG00000260455_29 (sequence is synthesized)
atggcactgggagaggacaactggaagctggtgcttaatttctcctctactccacgctatccaccttttcacttcgctgagttttttctgtatcctttcaatgtaataaactttaaccat

SEQ ID NO: 1040035 - DNA, 120 bp, Artificial Sequence
  ENSG00000260454_0 (sequence is synthesized)
tgttctcgtggtagtgaataagtctcaggagatctggtggttttataaggggaaacctctttcacttggatctcattctgccttgcctgccaccatgtaagatgtcccttgctcttccac

SEQ ID NO: 1040036 - DNA, 120 bp, Artificial Sequence
  ENSG00000260454_1 (sequence is synthesized)
catgattgtgaggcctctccagccatgtgaaactgtgtgcctatgaggtgaactgccatgtctacacatcccagtatgagtgagtgcaggtggtgtgcacgcgccctgcgatgggagtgt

SEQ ID NO: 1040037 - DNA, 120 bp, Artificial Sequence
  ENSG00000260454_2 (sequence is synthesized)
gtgtgtcctattcagggctggttcccgccttgcgccctaagctttggagataggcttcggccaccctcaaccctgaactggaataagcagaaaaccacatctggtcaggagcccagtgtg

SEQ ID NO: 1040038 - DNA, 120 bp, Artificial Sequence
  ENSG00000260454_3 (sequence is synthesized)
tcccacttggacaagaatagaaatctctcttctggaatatggtaaacacagattttgtttccaagttaacacataatgtagttctatcatgtttacagacagtaagttctcaatatcata

SEQ ID NO: 1040039 - DNA, 120 bp, Artificial Sequence
  ENSG00000260454_4 (sequence is synthesized)
ttaaatatagattctgtgccaaaagaatagggatcaacctgtcatctctatttccaggaattagtcttttttattcctctagtggaaacctttgaggaatttgctcattttccccctaaa

SEQ ID NO: 1040040 - DNA, 120 bp, Artificial Sequence
  ENSG00000260454_5 (sequence is synthesized)
gctgtgaagaaaagttaaaggtcaaatgggagaatagaatgaaagaagaagaaaacagaaactcaaagaaacctagactcttgaatttgaactcatttttttgcaaaataattgaatgag

SEQ ID NO: 1040041 - DNA, 120 bp, Artificial Sequence
  ENSG00000260454_6 (sequence is synthesized)
ctctccacctatttctcaatgaactgagaagcatggaggattcagggtggggctagggaggtggaaacccatgctttgattcagggagaggtaatgcttctaagcttcattaggaactga

SEQ ID NO: 1040042 - DNA, 120 bp, Artificial Sequence
  ENSG00000260454_7 (sequence is synthesized)
ataatggcaaggtgcccagggagcatgcctggattctggctccttgcccaaccctcaccctgccccagggcaaactcagaaaaccaagtcagatcatcataatgacgtgcatggctgctg

SEQ ID NO: 1040043 - DNA, 120 bp, Artificial Sequence
  ENSG00000260454_8 (sequence is synthesized)
ttacctgagacagaagccatgatgtcatcttgtcataattgacttcaggtttgtcactctcagatcttctctggttggagccaatggtttctttcagacctgagatatcctgatgaagca

SEQ ID NO: 1040044 - DNA, 120 bp, Artificial Sequence
  ENSG00000260454_9 (sequence is synthesized)
gaccacacctgccctcagagatgacctcatgaggaagctgagctgcataacaaacatctctgctgctcagccacctccactctttttcaacagaccttggagatagcacagcacccacac

SEQ ID NO: 1040045 - DNA, 120 bp, Artificial Sequence
  ENSG00000260454_10 (sequence is synthesized)
caaaaaatcaggaagctctcttatcagcaatctttctgtacctatgaaatcagacattccagccatggcagaacctcctgagtgggccagagcctcagagtcaggaaaagctggggccta

SEQ ID NO: 1040046 - DNA, 120 bp, Artificial Sequence
  ENSG00000260454_11 (sequence is synthesized)
atgatgtttcaaatcaaatcactctgtaggggattttccatttaacatattgtgattgtgcagtaacattagtctttgccatttaatttattaaattttaaaatcttataatatcctcaa

SEQ ID NO: 1040047 - DNA, 120 bp, Artificial Sequence
  ENSG00000260454_12 (sequence is synthesized)
gattgtgaggcctctccagccatgtgaaactgtgagtctgtgtaggttttttctggctactcctgtttcctcccacatcccaaaggtgtgcctatgaggtgaactgccatgtctacacat

SEQ ID NO: 1040048 - DNA, 120 bp, Artificial Sequence
  ENSG00000260457_0 (sequence is synthesized)
gacactcccatgagcactagatatgaatgtgggtggataggccatgacagcaaatggccctgcctttattacctgactcacttgtaccacaatagtcccaacatcactcactcctcattt

SEQ ID NO: 1040049 - DNA, 120 bp, Artificial Sequence
  ENSG00000260457_1 (sequence is synthesized)
attctttagggaactatttgaactctttcagaagacggactcctcgataaagcagtagtactcctgtttccaacatttcacattattaaatgaaaatgcaaggaacgaagaagggaagga

SEQ ID NO: 1040050 - DNA, 120 bp, Artificial Sequence
  ENSG00000260457_2 (sequence is synthesized)
gaggaggaatgcatggaagaagagaagacgaaaagaagaaaaataccttctcactcccacttctgcaaaatccactccaagcaatagtagtagagtaacaactcagctgaaaagtggtag

SEQ ID NO: 1040051 - DNA, 120 bp, Artificial Sequence
  ENSG00000260457_3 (sequence is synthesized)
caagcaagactaaaattttaacatatacagcaataacactgacatctgtctgtcttagcccaagtatgaaattacagaacttagcagacatgtttaaatcttacactcttacatactttt

SEQ ID NO: 1040052 - DNA, 120 bp, Artificial Sequence
  ENSG00000260457_4 (sequence is synthesized)
tccacaaattaaaaggataatattgtttgtgttagcttacatgggatacacataaaattagatattaggttattagtgacaattaattgaattgtttaaaataaagaaacttctgatcca

SEQ ID NO: 1040053 - DNA, 120 bp, Artificial Sequence
  ENSG00000254334_0 (sequence is synthesized)
gttgctccctctcccccagcatcctcctgggacatacagcgatggcccccacacctggaaggactcaagctctgaatccagcaccttcaggaagcaagtgatggcatcccagaggcccta

SEQ ID NO: 1040054 - DNA, 120 bp, Artificial Sequence
  ENSG00000254334_1 (sequence is synthesized)
tgcttgagacagactgacgaaaacaggtggatctaggtaaaatcagtctctgctaccctcctcatctaaaccctcagtgcagggccaccttggaagccatgtgttaacactgagtgatcc

SEQ ID NO: 1040055 - DNA, 120 bp, Artificial Sequence
  ENSG00000254334_2 (sequence is synthesized)
ccaagtccctaatgcatggaaaagaacctcctgacccagtccccaaaggctggacttttcctttgcaagaaataaggaggtattgtattaagccacagtgttgttctattacagaagatt

SEQ ID NO: 1040056 - DNA, 120 bp, Artificial Sequence
  ENSG00000254334_3 (sequence is synthesized)
aagcagtgcttaaattaacatatacctcccccaaaaaaaacatggtcaggagtcaggtaactcttataaagtaattagcacctagtgtcacggaatgtggatttctgtcaatgtgaggcc

SEQ ID NO: 1040057 - DNA, 120 bp, Artificial Sequence
  ENSG00000254334_4 (sequence is synthesized)
atgggaccctggaacaatgctgccacttcctatgaatctatttcttaaattgcagggtaaagttcaccataaataacaaagtcatggagtcaagctgtcacaattggccaccgttcctaa

SEQ ID NO: 1040058 - DNA, 120 bp, Artificial Sequence
  ENSG00000254334_5 (sequence is synthesized)
gcaataggcaaggctatgacagcacacccgaatcccaggacccggggataagtcgtatcttaggaatatctgcccatgaaggcagtgggccgcaggatcccactttgaggtgccagtgct

SEQ ID NO: 1040059 - DNA, 120 bp, Artificial Sequence
  ENSG00000254334_6 (sequence is synthesized)
gattgtcattccttccaagatggtaaaccattaggacatctggatccctccctaagatcaaccctggaggagctgcagaggagaaacagggcacaagaggaccagagagggctgtgggga

SEQ ID NO: 1040060 - DNA, 120 bp, Artificial Sequence
  ENSG00000254334_7 (sequence is synthesized)
aaggtgtaatatttaaatgtatttgcaaacctgttttgggccaaaaggggtaggaggaagagaagacgcatttgctgagatctattatatgccaattggaggactacagatttcacaatt

SEQ ID NO: 1040061 - DNA, 120 bp, Artificial Sequence
  ENSG00000254334_8 (sequence is synthesized)
tcccaaagataattctaaagttacacattatcatctccatttacaattaagaactgatgctccaagaagaaagatctcacagtgtgtaggcaacagacctaagattcaaacctatattgg

SEQ ID NO: 1040062 - DNA, 120 bp, Artificial Sequence
  ENSG00000254334_9 (sequence is synthesized)
tgggtgttaatgtccttgttctttctgatgtaagcatgtaacatttccacatctctgattccatgctcaaggtgggccaagccatgctgcttgtaagacagggtgcctgtgatgacacaa

SEQ ID NO: 1040063 - DNA, 120 bp, Artificial Sequence
  ENSG00000254334_10 (sequence is synthesized)
gtcattaatgcaagtgttaagtgccatgcaagcacagaagccacttaaaatgggttttcggaaatgaaagctgggctcaaacagagcccactttcaagggggcctggtttaagtggccaa

SEQ ID NO: 1040064 - DNA, 120 bp, Artificial Sequence
  ENSG00000254334_11 (sequence is synthesized)
actctcaagaagaaaggcattaaaggaagagcctttctgctgggctggcaaaactttaggttcatgaattcaggaggagactgaggaggagaaaacagggttttagaatgcagcctcagg

SEQ ID NO: 1040065 - DNA, 120 bp, Artificial Sequence
  ENSG00000254334_12 (sequence is synthesized)
agctgcctgcacctctcaggccaggaggttggcttttccaattgtgcgattaagctattctacccagccccacctctcattttcaattaatctgcactaatgaattcaacaaccaaaatg

SEQ ID NO: 1040066 - DNA, 120 bp, Artificial Sequence
  ENSG00000254334_13 (sequence is synthesized)
catttgctaattgaggtgcttgctggccaggtcatccgcgctcccttgtctaacagctggtactccccactgtgccacggtaaagtagggtagtagaggcctctgctcccctcatcccct

SEQ ID NO: 1040067 - DNA, 120 bp, Artificial Sequence
  ENSG00000254334_14 (sequence is synthesized)
gctgcccctgaggggaatacccagtgggcaagaaaaggcccagcctgggagagaatgctcataatatattactaagtcacagacagaaattgctcctccgggcagtctttcactttttgt

SEQ ID NO: 1040068 - DNA, 120 bp, Artificial Sequence
  ENSG00000254334_15 (sequence is synthesized)
ttctaagtgaaagctcatgaccatcccagccatattatctccctggcccttggaagctgttatgtaatggaaagggcattaaactcaggccaggaaattcttgatacagaacccagactg

SEQ ID NO: 1040069 - DNA, 120 bp, Artificial Sequence
  ENSG00000254334_16 (sequence is synthesized)
ttgttgataactgggttgactttggaaagtgactgcctccctccctctcggtttgctcatctggaaaatgaaactaatggaactgaccttggagtcatggtgaagtgcccgtgaatgtaa

SEQ ID NO: 1040070 - DNA, 120 bp, Artificial Sequence
  ENSG00000258489_0 (sequence is synthesized)
atgaggagtgagttcacgggagatctggttgtttaaaagtgtgtgacatatgcccccttcactcatgctcctggtctggccatgtgggatgtctgttcctcgcttccctcctgccatggc

SEQ ID NO: 1040071 - DNA, 120 bp, Artificial Sequence
  ENSG00000258489_1 (sequence is synthesized)
tgttaagtttcctgaggcttcaccagaaaccaagaggattccagcaccatgcttcctgtatagcctggagaactccaagaaggatcgtgtcagtcctgcaacttgtcagtggaattaaat

SEQ ID NO: 1040072 - DNA, 120 bp, Artificial Sequence
  ENSG00000258489_2 (sequence is synthesized)
ttcaggcgttttaaagataaatggtaaaactgaactggaaatccatctggccggctgcctgctctaatgaataaccccactttggctcgtgcaatgacttcttccctttggaatgcaagt

SEQ ID NO: 1040073 - DNA, 120 bp, Artificial Sequence
  ENSG00000258489_3 (sequence is synthesized)
gcggtggcagtgtcaaggatgcctgtgtgtttgcagcaggttccttccagaagcagctgcaagtgccacctccaggccatctggccaatgtgaggaaaggaggctgcaagggcttggcaa

SEQ ID NO: 1040074 - DNA, 120 bp, Artificial Sequence
  ENSG00000258489_4 (sequence is synthesized)
aggactgccttatcgccgtcagtggctgtcaaaaatttataagtatattcatttccctattcaacttaattggtattttgggtatgacactagaaaagcaagttagacttgcctgttgga

SEQ ID NO: 1040075 - DNA, 120 bp, Artificial Sequence
  ENSG00000258489_5 (sequence is synthesized)
gtccaaggatacctccaacaaaattctagacaataaaagaaagggtaagtgtctgaggggagggggcacttacaaattattccatttaatgctaattcgaggcttccagattcattttgg

SEQ ID NO: 1040076 - DNA, 120 bp, Artificial Sequence
  ENSG00000258489_6 (sequence is synthesized)
gaaaatcaaagagcaagagctgtatgcatggctttttaaaacacaaagaaaattgggaagcatgggcttcccaattttcctgcgcataaacttctagaacaatttctattgttgatactt

SEQ ID NO: 1040077 - DNA, 120 bp, Artificial Sequence
  ENSG00000258489_7 (sequence is synthesized)
taaaaaaaatctttttcttttctgtgatgtggtcttttaaactcataccacaacttatggctccctctacttcctatattttaattgatcttgaggttattttcaagtcactgggcttaa

SEQ ID NO: 1040078 - DNA, 120 bp, Artificial Sequence
  ENSG00000258489_8 (sequence is synthesized)
tgaacaaatattttagaatttcttcctttatatacactcatttctgtctcaataaaatgtctaatcaggaattcacttgtgtagaaaataaaaaatagaagtacatacccttcaagtgaa

SEQ ID NO: 1040079 - DNA, 120 bp, Artificial Sequence
  ENSG00000258489_9 (sequence is synthesized)
actttgtgaaggttttctcaactgttctcttaacaaaaattagcacatatttgtttttagttcatactgagatttgtaggacgaggacctcagacccacagttcctgagcaattattctg

SEQ ID NO: 1040080 - DNA, 120 bp, Artificial Sequence
  ENSG00000258489_10 (sequence is synthesized)
taatttttcttgtcactttataatttaattcctaaagtattagaaataaattcaatcttacagtaatctctatttccttttttttcttttaaaaaacactggaaaacaacaataccactg

SEQ ID NO: 1040081 - DNA, 120 bp, Artificial Sequence
  ENSG00000241818_0 (sequence is synthesized)
ataattctcttaaagtagtgacttcaccaacaggaattccaggccccctggtgtgccagctcaagggataagcagagtatgtcgggttcccaggtgccaatgaacagagaaatagccaaa

SEQ ID NO: 1040082 - DNA, 120 bp, Artificial Sequence
  ENSG00000241818_1 (sequence is synthesized)
tgccacaggcaagaatccagatggttccaacctacctcagccagtatgacgtgaaacaaggtcccagcttgaacactctgagttttgaacagatatgtctgagaggacatctgccagaag

SEQ ID NO: 1040083 - DNA, 120 bp, Artificial Sequence
  ENSG00000241818_2 (sequence is synthesized)
cctatttgcatgaggaacttagaaacctccaggagaaagctcagactgaaggaaagaggagtcggcttgccaactgcaaggcaccagacaataaataatgccttagtggtcaatggaaag

SEQ ID NO: 1040084 - DNA, 120 bp, Artificial Sequence
  ENSG00000241818_3 (sequence is synthesized)
gtgacatcagaagccaccagccattcctcaaattgccagctctggagccctccatcctgcactagaaggagatactgcaaaccctgccaaggtgttcatgcttctcgtgctttaacattt

SEQ ID NO: 1040085 - DNA, 120 bp, Artificial Sequence
  ENSG00000258481_0 (sequence is synthesized)
ttctttcctgcagaccgtgagaacaggctgttccaacgagacttgaaaagctgcctttggtggactgacttcccggtcccctcaaagaatgtcagtcctgagggtctgtaatcctctcac

SEQ ID NO: 1040086 - DNA, 120 bp, Artificial Sequence
  ENSG00000258481_1 (sequence is synthesized)
tcccaaagtaagaggaccaaggcggcttgaggaagaatcaagggtagtatcggcttcaggaagtaacaaagcacaggcagggtcctctgcgaagtgatgcagatgaaaccccaggaatga

SEQ ID NO: 1040087 - DNA, 120 bp, Artificial Sequence
  ENSG00000258481_2 (sequence is synthesized)
tttacagaaaagacttacaggttaaagtgcctaaggtcctgcagtctccaaacctggccaatccacccgcagagcccatgctctgaaccaccgcaccacatggccaggtgagggccgtct

SEQ ID NO: 1040088 - DNA, 120 bp, Artificial Sequence
  ENSG00000258481_3 (sequence is synthesized)
cggtccccaaatgagccgcctacgcatacactgccaagcctttgcccacgctgttggctctcccctgctgtgcttggaacgcctacttgaccttcaaattccagcctgagtcctccacct

SEQ ID NO: 1040089 - DNA, 120 bp, Artificial Sequence
  ENSG00000258483_0 (sequence is synthesized)
gtttaccaagcctgctggagcctctgaagggcagcagccagctcaccccccatgccctggatggcaacaaggcacaggagaccgcagagcatacaaacagggcaagaggaaaccatctat

SEQ ID NO: 1040090 - DNA, 120 bp, Artificial Sequence
  ENSG00000258483_1 (sequence is synthesized)
caatgaccagggaccagaggaagcaaagttctaacatctcgctcacgttctcccaaggcccagagcactcctcttcttggtggataccaatgcactttgagaagaagcaggaatgcatgt

SEQ ID NO: 1040091 - DNA, 120 bp, Artificial Sequence
  ENSG00000258483_2 (sequence is synthesized)
ggatcaagtactactaatataaaaatgaaaagatgataccaggcaaagtaaaacctgggttgtggtgacagcagcactcgtgtctgacgtctgatgcagacccttccatgaagtggcctt

SEQ ID NO: 1040092 - DNA, 120 bp, Artificial Sequence
  ENSG00000258483_3 (sequence is synthesized)
gaaaaatgacaccccacattcctggagcggtactggagccaccagagtgagcagaatgaagctgtttttaaagcctcattcccaaagatttgtcctttcggaactgtctcgtcagacctg

SEQ ID NO: 1040093 - DNA, 120 bp, Artificial Sequence
  ENSG00000258483_4 (sequence is synthesized)
tctggtaatactctggaagactccacatgcaagattgtctgtatttgacctgacttggagatttactggtttctggtatttacagaaatctctgtcctatccttactcaacaaccaagct

SEQ ID NO: 1040094 - DNA, 120 bp, Artificial Sequence
  ENSG00000258483_5 (sequence is synthesized)
ggcaggtcactgacttgctctcaccctcagcccctctgcatataattctcagtttctccagaaagcattttacctgtgcttcagagggactatttaacaaagacatttgccattttccac

SEQ ID NO: 1040095 - DNA, 120 bp, Artificial Sequence
  ENSG00000258483_6 (sequence is synthesized)
tgcccggtggctgacacccagaggaagcacagcctcccctctgaagcttcctctactgcagtctctgtgctcatcgcaaggatctctccatattgacttatatttgtttctggtcttata

SEQ ID NO: 1040096 - DNA, 120 bp, Artificial Sequence
  ENSG00000258483_7 (sequence is synthesized)
tttttctctatggacagacttctattttcagaagatagatatttaagtcacaatattctggactctggcttagttagaccaaccgtctcttgatcgtctgtggaaactgaatcaggaaca

SEQ ID NO: 1040097 - DNA, 120 bp, Artificial Sequence
  ENSG00000258483_8 (sequence is synthesized)
ccccagagagctggctctggatgtaattcacagcttcatttaattattatcatcaaagttaatgaaggccataaactgtttcataacataccaatgggaagtgtgattggagggaaagct

SEQ ID NO: 1040098 - DNA, 120 bp, Artificial Sequence
  ENSG00000258483_9 (sequence is synthesized)
ggacacctcaccataaaactggcacagcagaaacggctcgacttaacaaaaccttcttatgaagaaaaagacaatgaaaccatgttcagtttagtgaacctttcacacttggcaacatga

SEQ ID NO: 1040099 - DNA, 120 bp, Artificial Sequence
  ENSG00000258483_10 (sequence is synthesized)
atgttaagtcaaaagaacaatggagctatgagtttttttaatcaaatttttattttgggtcaaataagccattttgtttgtttgttattaagtgtaaagagagctttcggttagctattt

SEQ ID NO: 1040100 - DNA, 120 bp, Artificial Sequence
  ENSG00000258483_11 (sequence is synthesized)
taaaagatagaaagaaaacttagaagatggaagagaaataattgcactagaaacctggccaatatcatgaacaggctccatatagggactcctgtatatagatcgctgtgtgtgtggata

SEQ ID NO: 1040101 - DNA, 120 bp, Artificial Sequence
  ENSG00000258483_12 (sequence is synthesized)
gtacgttcaataaatgtattatctgaactgcttttaaagttctactcttggattcctgaaatactatctctatggatttgcctattctggatgcttcatatagatggaatcattcattac

SEQ ID NO: 1040102 - DNA, 120 bp, Artificial Sequence
  ENSG00000258483_13 (sequence is synthesized)
gcaaccctttgtatctggcttctttcatttagcatgaggctttccaggttcatccatatcataagaagtatcagtattttactccactttaaagttctgtaatagttactatctatctat

SEQ ID NO: 1040103 - DNA, 120 bp, Artificial Sequence
  ENSG00000258483_14 (sequence is synthesized)
ttggtatacatacatgtatatattaattttgcttatccatttattcatttatgaacatttggattgtttctacctcttggaattgtaaatcatgctgttatgaacatggatgtacacata

SEQ ID NO: 1040104 - DNA, 120 bp, Artificial Sequence
  ENSG00000258483_15 (sequence is synthesized)
ttagaatcaggcataaaatcatgggactccaatggaagactcaggggaccctgacccacggccaggcagacagcccctcatgggcccagataacccttcatccatatgaattgaacactg

SEQ ID NO: 1040105 - DNA, 120 bp, Artificial Sequence
  ENSG00000258483_16 (sequence is synthesized)
taagatatccacagcttcagttctcatagctgggacctctgctttatgccataaagtttactgagaaacaagcatttgttcactcttctgggcagtgggcacagtgctgcatctttatga

SEQ ID NO: 1040106 - DNA, 120 bp, Artificial Sequence
  ENSG00000258483_17 (sequence is synthesized)
taacacggtgcacccacacctccatccctgtccctgtcctgccacatggctgcctcttttgaggactccacctgggtcattgaatatactctggagggcacagtgatctagccttcccat

SEQ ID NO: 1040107 - DNA, 120 bp, Artificial Sequence
  ENSG00000258482_0 (sequence is synthesized)
ctgagtatccgggagggaatgcacaacattcttaattgcacttatgaggagagaacgttctcttaacttctactggttctggcagggtctggaaaaggacttgtgtctttgaccttaatt

SEQ ID NO: 1040108 - DNA, 120 bp, Artificial Sequence
  ENSG00000258482_1 (sequence is synthesized)
cagatggaggagggagacaaacattttaaagaagcgcttggaaaagagaagttttatagtgttttgaatatgctggtctctcatcctggagattcaggcacctacttctgtgctttgagg

SEQ ID NO: 1040109 - DNA, 120 bp, Artificial Sequence
  ENSG00000258487_0 (sequence is synthesized)
agacttcctaggtagctctgaaacaggtggtctgtagaccacactttaagaattatcttcaaggattgggctagttttagtttgtagtgatttcttgtgtctcttaatgaaggcctagac

SEQ ID NO: 1040110 - DNA, 120 bp, Artificial Sequence
  ENSG00000258487_1 (sequence is synthesized)
tcaggatgcagcagagagttgcttctacaaaggcactgcagtttctgaaaacaaagcgatgcaacttaagccctcctattgtggatgaaacaggactttgggatgtggccattgtcagca

SEQ ID NO: 1040111 - DNA, 120 bp, Artificial Sequence
  ENSG00000258487_2 (sequence is synthesized)
gcagggaatcagagatcacaggaaaattgaagtctagactcatgaaagcagttggtgtagataactgaaactgcagaagagaaaactgtgaataaaagggaacaactgtacccttacaac

SEQ ID NO: 1040112 - DNA, 120 bp, Artificial Sequence
  ENSG00000258487_3 (sequence is synthesized)
ctcaggatgcagcagagaggtaccctggatatacaggctttttggaatactgatgtgagtgtagaggccagaaaaatgaagctaggtggtattggaggagaatctctgaagactgctctc

SEQ ID NO: 1040113 - DNA, 120 bp, Artificial Sequence
  ENSG00000258487_4 (sequence is synthesized)
agtaggctgacaacaagttaagatgaatgtgtaactgttttctacattcttcttactgctataaaaataattgaaatgcagaatgcttaacttcattcagctgtaagccttgtaagaaca

SEQ ID NO: 1040114 - DNA, 120 bp, Artificial Sequence
  ENSG00000282440_0 (sequence is synthesized)
ggagcgcgtctcctgcttctccctgcacccaacgatttccgatatcatatcatataatcatctcaactccaaatatgacgttggcactgttatttccattttacaaatgaagagatgagg

SEQ ID NO: 1040115 - DNA, 120 bp, Artificial Sequence
  ENSG00000282440_1 (sequence is synthesized)
ttgagaggtatcgtttattatcttggcctataagtacatggaagagttggaattcgaactgagagccaggatatgaacttacaagtgccttgctttagcactgcctgtcccagaaggatt

SEQ ID NO: 1040116 - DNA, 120 bp, Artificial Sequence
  ENSG00000282440_2 (sequence is synthesized)
agacttctggaggggagcattgacctgaaaccacagtgggaatgcatcaagtacagagtataaagaaaatctatcaagattggttcaacagcctttggctatgaaagtctcaaggaatga

SEQ ID NO: 1040117 - DNA, 120 bp, Artificial Sequence
  ENSG00000282440_3 (sequence is synthesized)
ctaataatcagttttgattagtgagaagagagaagcaggaataaatcagctccacacatgtgactcaacctaggatcaagagttccagtttttcccatgtgaatgacttagttttttttt

SEQ ID NO: 1040118 - DNA, 120 bp, Artificial Sequence
  ENSG00000282440_4 (sequence is synthesized)
aaatgctattgtggaagaataaatagtgtatgaagactttaaatttttaaatccttgaaaactttataaaatgagaaaagtttgctcatataatgaggaattatattgaaactaaaaata

SEQ ID NO: 1040119 - DNA, 120 bp, Artificial Sequence
  ENSG00000254484_0 (sequence is synthesized)
ccacttcccatcatggatggcttcaactcagctcccgcagtatcctggtcacctctcacccagagcacgtactgctctgaggttcctgccagctcgtctgtctgttctttaaagcatcct

SEQ ID NO: 1040120 - DNA, 120 bp, Artificial Sequence
  ENSG00000254484_1 (sequence is synthesized)
atttcttgaaagaactgtaacgtccgatcgaggtggaagcactcacttgtgctttgatgcatctcccctccaaacacaacagtgaaaagcctcgagaactgtgaagaatgaatttctgtt

SEQ ID NO: 1040121 - DNA, 120 bp, Artificial Sequence
  ENSG00000254484_2 (sequence is synthesized)
gtttaaaaggtaatgggagttagttacagcagcctgaatggactgagccactagacagggaggagagcaccagcaacagaaaaccttctgtcgcgatgagcccgagaccccaattcctct

SEQ ID NO: 1040122 - DNA, 120 bp, Artificial Sequence
  ENSG00000254486_0 (sequence is synthesized)
aagtttcctgaggcctccctagaagccagtatgcttcctatacagcctgcagaaccctcaggattctcacggtgtggctgctgcagggaagtcagatcacctacgtggaggcccaggggc

SEQ ID NO: 1040123 - DNA, 120 bp, Artificial Sequence
  ENSG00000254486_1 (sequence is synthesized)
ctggctctggaaacaggaggcagaagctgccagtctctagtcttgggcctggcaactggcatagcattacttccgccctattccatcgctcaagcagtcacagaacccacctggcttcag

SEQ ID NO: 1040124 - DNA, 120 bp, Artificial Sequence
  ENSG00000254486_2 (sequence is synthesized)
caggaaggggcaaggaccccgcctcctaatgggagcagtggtgaagaatttacagtcatctttaatctgtcatacccgctgagaagaaatagattttctgccacctgaaaagttgaaagt

SEQ ID NO: 1040125 - DNA, 120 bp, Artificial Sequence
  ENSG00000254486_3 (sequence is synthesized)
cacatgtgtttttctcttacatcatggctttcctgaggtgatggcagcagctcagtccagctgccgtctgattgggcgaagggtcctagaagaaggaaatacaggaggggaggaatcttg

SEQ ID NO: 1040126 - DNA, 120 bp, Artificial Sequence
  ENSG00000254486_4 (sequence is synthesized)
gctatttcaaaatgtcattccttgcatttatgcaaccaaggaatccacgaagtcaaatcatacgtaacaattcaaaagatcttcagaaagatctttttaaaattttttcttttttaaaaa

SEQ ID NO: 1040127 - DNA, 120 bp, Artificial Sequence
  ENSG00000254486_5 (sequence is synthesized)
atatattttttcttttgagacaatctcacgttgtcgccccgcctagctagttttgcatgtagctatcaatacttacgtattcatgtttttaaaagtaatatcgtattgtaaacagaattt

SEQ ID NO: 1040128 - DNA, 120 bp, Artificial Sequence
  ENSG00000254486_6 (sequence is synthesized)
cagaatttgtaacctggtttttatgcttaccattttatcttcaaaagatcttggctcactgcaatttctgcctcctgggttcaagcgattctctgtctcagcctcccaagtagctgggat

SEQ ID NO: 1040129 - DNA, 72 bp, Artificial Sequence
  ENSG00000254486_7 (sequence is synthesized)
cacacctggctaattttttgtattggcctcaaatgatcctcctgtcttggcctcccacagtgctgggattac

SEQ ID NO: 1040130 - DNA, 120 bp, Artificial Sequence
  ENSG00000254486_8 (sequence is synthesized)
ttacaggcatgagccactgcacccagcacataaagatcttttgattctaacacattttaatgttttctgtttgtgtgtttttttgatattttataacatgaatacatgtcttttttattt

SEQ ID NO: 1040131 - DNA, 120 bp, Artificial Sequence
  ENSG00000254486_9 (sequence is synthesized)
atttcaggaaaaaagagattataaaacaaaaagaaaatactgttacaatgaactgaatgtttgtgtccctataaaatgtttatgttgaagctctaatcccaaagtgatggtattaggagg

SEQ ID NO: 1040132 - DNA, 120 bp, Artificial Sequence
  ENSG00000254486_10 (sequence is synthesized)
tagggactttgggaagtaattaggtcatgatggtggagccctcataaacaggatgagtactcttataaaagggaccccaggctgggcatggtagctcatccctgtaatcccagcacttgg

SEQ ID NO: 1040133 - DNA, 68 bp, Artificial Sequence
  ENSG00000254486_11 (sequence is synthesized)
gagcccaggaggcagaggcaacctgtctcaaaaacaaaaaacaaaaaagccaccccagagagctcctg

SEQ ID NO: 1040134 - DNA, 120 bp, Artificial Sequence
  ENSG00000254486_12 (sequence is synthesized)
agaagttggcagtctgcaagccatagagggcccacaccagaaccatgctggcaccctgatcttggacttccagcttccaaaattgagaaataggcggggtgcagtggctcacgcctgtaa

SEQ ID NO: 1040135 - DNA, 87 bp, Artificial Sequence
  ENSG00000254486_13 (sequence is synthesized)
tgaaccccggaggtggaggttgcagcactacaaagacagattccatctctaaataaataaatgctgttgtttttaacccacccagtt

SEQ ID NO: 1040136 - DNA, 120 bp, Artificial Sequence
  ENSG00000254486_14 (sequence is synthesized)
tctaaataaataaatgctgttgtttttaacccacccagtttatgatattttgctatagcagcctcaacaggctaaggcaactgtcctgtggattattaactagttggctctttatacaaa

SEQ ID NO: 1040137 - DNA, 120 bp, Artificial Sequence
  ENSG00000254486_15 (sequence is synthesized)
ttctattgagcacctagcacgtaccaattaccagtctattcactgcaataagcaagccagacagggtccctgtcctcctggagctcatggtctggagaagcacctggactgttctttggt

SEQ ID NO: 1040138 - DNA, 120 bp, Artificial Sequence
  ENSG00000254486_16 (sequence is synthesized)
agtggcatctgaatccagagcttcctgagttttgctcctagaggaccttgtgcagagctgcctgctgagggggaacagcccaatggcttcctagcgcacttgccaaatacctgcctccaa

SEQ ID NO: 1040139 - DNA, 120 bp, Artificial Sequence
  ENSG00000254486_17 (sequence is synthesized)
gccgtctgcttcttccatcaggtccttgcttttggatcccagagacttcatttcctgccctacttttccttccaagagctcagtggagagttctcttcctaaaaaaagagaagcttactt

SEQ ID NO: 1040140 - DNA, 120 bp, Artificial Sequence
  ENSG00000254486_18 (sequence is synthesized)
cctcagcagtgttatctctgggtctcaaccataaggctggaattttcccactcagccatggagtagtgttgccctttccatcttcctgaagccagagcatgcaacatgtggtagaagcca

SEQ ID NO: 1040141 - DNA, 120 bp, Artificial Sequence
  ENSG00000254486_19 (sequence is synthesized)
ttagtaagagatgggtagcagtcaagggcatggccccaagtctggactcgtggctactggggagaaagggaaattgatgaagctcctatagtgtgactgctattgtgtgctacattcaca

SEQ ID NO: 1040142 - DNA, 120 bp, Artificial Sequence
  ENSG00000254486_20 (sequence is synthesized)
gaatccccaactgccctatgatgcagaccaggctctccaaggctgggtcctgagaaatggtactttcttcagatgttaatagattctgtgtgcaattttgggaaattctatagttctttg

SEQ ID NO: 1040143 - DNA, 120 bp, Artificial Sequence
  ENSG00000254486_21 (sequence is synthesized)
ttcagtgcttttaataggctaatgtgcatggtgaaactcaaagggggaggttatgacaggcagtctcccccaaatttatttcacccaaatgccccatactagattgaatagtgtcccccc

SEQ ID NO: 1040144 - DNA, 120 bp, Artificial Sequence
  ENSG00000254486_22 (sequence is synthesized)
aaaattcaagtccacccagaacctcggaatgtggccttatttggagatagtctttgcaggcataattaatcaaggtgatgccacgctggagtagagggagccctaacccaatgacggatg

SEQ ID NO: 1040145 - DNA, 120 bp, Artificial Sequence
  ENSG00000254486_23 (sequence is synthesized)
tccttagaagacgagaaaacagagacacatggcgaagaaggccatgtgatgagagggtcagagactggagagattcatccacaaaccaaggaacgtcaaggggtgccggaaacccccgaa

SEQ ID NO: 1040146 - DNA, 120 bp, Artificial Sequence
  ENSG00000254486_24 (sequence is synthesized)
cccccgaagctaagaagaagcaaaaaaggagctttcccctcagggttcagagggagcatggcctggctgacacctcgattttggacatctagctccagaactgtgagaaaataaatttct

SEQ ID NO: 1040147 - DNA, 120 bp, Artificial Sequence
  ENSG00000254480_0 (sequence is synthesized)
actctaactttgggcaggacttctaagagcttctaatctgtaactcctttttgtacaccaaccccaaccacccagccttgggaaactgagtgtacaaggcctcagcctgggtacaccgaa

SEQ ID NO: 1040148 - DNA, 120 bp, Artificial Sequence
  ENSG00000254480_1 (sequence is synthesized)
aggaagcagagaggagaagcgagtcaagaagcttgagatctgacacaggatgacacagcaagaaggccctcaccagatgctgagcagatgccggcaccatgcctgtggacttcccagcct

SEQ ID NO: 1040149 - DNA, 120 bp, Artificial Sequence
  ENSG00000254480_2 (sequence is synthesized)
gctctgtaacctggggatttggtcttctgaaaagggcaccagagaaaaactgctcttaagcctctgttaactgacacagcagtagaactccaaggtgttgatccttggattcatgtttct

SEQ ID NO: 1040150 - DNA, 120 bp, Artificial Sequence
  ENSG00000254480_3 (sequence is synthesized)
caacttcagagacacacatcactccttcctgaccactgggcatccatcccaccaggagctcctaatctgagagctgttagaaatcctccaaaagtgctgactgcagaagttggtagcttc

SEQ ID NO: 1040151 - DNA, 120 bp, Artificial Sequence
  ENSG00000254480_4 (sequence is synthesized)
tgctcaagatgacagaacaagattaacttttgtattcttcagcaccttttttattttccattatcacactttgataccctctaaaacattaaaacaccttctagaatgcttatgtgatca

SEQ ID NO: 1040152 - DNA, 120 bp, Artificial Sequence
  ENSG00000254489_0 (sequence is synthesized)
acacattctttcggagagggagggcaagacttttctccggagcctctggcaactcgtggagtctatataagctctggattgattgatgaccaccggcggccaatggctctgacaccacgc

SEQ ID NO: 1040153 - DNA, 120 bp, Artificial Sequence
  ENSG00000254489_1 (sequence is synthesized)
tgagcccgagcccggggccgccgcctcctccctgctctacgcctgggcgctgccaggttccttccctggaacggcggagaaaggaagggagggagccagcgagcgttggaagggggtgtg

SEQ ID NO: 1040154 - DNA, 120 bp, Artificial Sequence
  ENSG00000254489_2 (sequence is synthesized)
gaggccacgggatctccccctcttctgacatcttttttcacttaaacttttgtttgtcccacccccccgacctgtttgtgtttgtttgcagcatctcaaatcaattatacatttttcatg

SEQ ID NO: 1040155 - DNA, 120 bp, Artificial Sequence
  ENSG00000254489_3 (sequence is synthesized)
gaacttgtctccagcactgcggacacccgggtgacacattctttcggagagggagggcaagacttttctccggagcctctggcaactcgtggagtctatataagatcttcaaagaaagag

SEQ ID NO: 1040156 - DNA, 120 bp, Artificial Sequence
  ENSG00000254489_4 (sequence is synthesized)
atatcctttcgaggcaacacaagaagccaactacaaatgagaatattattctcttggtgcagggattgttgcatgtggaccccatcagccttgaaaagtccatgcaatggagtgaaactt

SEQ ID NO: 1040157 - DNA, 120 bp, Artificial Sequence
  ENSG00000254489_5 (sequence is synthesized)
gacaaagcagttgcagtcgttcaccagtgaagcaaagtcttcttcctagtcacgcaggaatttttttgggggagataacttgatgcctggagctgctgctgcatcttatgtaaatgacaa

SEQ ID NO: 1040158 - DNA, 120 bp, Artificial Sequence
  ENSG00000254489_6 (sequence is synthesized)
ctaaggataaaaaccacacacattacccaaggtgcagtaaaagaagatattttgggaggaagagagaaagcaagagagagaaaccacattttcataacttttgttacagtatattgttat

SEQ ID NO: 1040159 - DNA, 120 bp, Artificial Sequence
  ENSG00000254489_7 (sequence is synthesized)
tttattattattgttgttcatattttactttaatttataaattaaacttcattataggtatgtacaggaaaaaatatggtattatatatgatttggtactatccttggtttcaggcatcc

SEQ ID NO: 1040160 - DNA, 120 bp, Artificial Sequence
  ENSG00000254489_8 (sequence is synthesized)
tttcaggcatccactgagggtcttggaacatatcaccttggataggggagactactgacttccttactgctctatgtgacaaatgaagtttggtcttatttgcagccaggaaaattttat

SEQ ID NO: 1040161 - DNA, 120 bp, Artificial Sequence
  ENSG00000254489_9 (sequence is synthesized)
tatcaagactttaatattaatacagaaataggaacttccagggatagacaaaaatgaagagagcatctgttccagcttctttattttaaagatttgaggctcagagaggagatatacttc

SEQ ID NO: 1040162 - DNA, 120 bp, Artificial Sequence
  ENSG00000254489_10 (sequence is synthesized)
ttcaaaatcaacagcctattagttcacaactgcgattacaatttcgtctcctggctctgggtttaataatattcccccacatcataaaaccttggaactatcgaaatgatagctttgagg

SEQ ID NO: 1040163 - DNA, 120 bp, Artificial Sequence
  ENSG00000254489_11 (sequence is synthesized)
ggaaaaataggcaaagaagtaatatgttaaactttccctgggatgcaggctttaatcaggtttcaaattcttccaacataatataatttaatggtgagagctcttgacattaagaggtga

SEQ ID NO: 1040164 - DNA, 120 bp, Artificial Sequence
  ENSG00000254489_12 (sequence is synthesized)
aatttatatttaaaaggctaagatcgtgacatattaaagcacttcaaaaatgttggcaacaaataccaagagtaactgatggttgttattatacaagaacaaagaagttcatcctctgga

SEQ ID NO: 1040165 - DNA, 120 bp, Artificial Sequence
  ENSG00000254489_13 (sequence is synthesized)
tgtgtttcatcacccataatggaaagtgcctgtcactccttgaacaacatcatatggttggtggccggtggataatggaccactgagtgtcaaggtgactggctttcaatgcacacaaaa

SEQ ID NO: 1040166 - DNA, 120 bp, Artificial Sequence
  ENSG00000254489_14 (sequence is synthesized)
ctaaaaattatagacctgtcattccacaggcaggccacaattagctgtctatgcaacttgaaatttccattttgccagctgagtaatcatttgactagagtttttcatttggaagcattt

SEQ ID NO: 1040167 - DNA, 120 bp, Artificial Sequence
  ENSG00000254489_15 (sequence is synthesized)
ctaagccttttgtgtgcaagtcttttaaaatgtggatcctgaagtaaataaacagtgcacttaatcagatgtattctttttagaaacaccccttcggaaacacacaggcaaaccccaaca

SEQ ID NO: 1040168 - DNA, 120 bp, Artificial Sequence
  ENSG00000254489_16 (sequence is synthesized)
ttgttgtaatagtaacaacaataatgtgacaaaacaatataagccttgggtattttatttagggatcttaaaagttcacagcgaaaggtaagaatcatttcttaatacctcagagtgcag

SEQ ID NO: 1040169 - DNA, 120 bp, Artificial Sequence
  ENSG00000254489_17 (sequence is synthesized)
aatttagaaaaagaaactgagattttagcagtcagtaactagataaggtcaccaaaggagaagtaaactcagagctaggggtcaaaacttgggaatttcagtgtcagaaacattcactga

SEQ ID NO: 1040170 - DNA, 120 bp, Artificial Sequence
  ENSG00000254489_18 (sequence is synthesized)
ttcaaaactatccatttaccagttttctatttacatttggtttccaactccatatctgagttctgtcatttctctgattctttgagggatagagaaaatgataccaagtggagtctgttg

SEQ ID NO: 1040171 - DNA, 120 bp, Artificial Sequence
  ENSG00000254489_19 (sequence is synthesized)
gaaaattgtgttgtaatttccattcagttgctgtacgtgaagtaaacttcaggattctacaatcccagatcagattctagactgtctaattgaacctgaatcttcttttaccctcttcct

SEQ ID NO: 1040172 - DNA, 120 bp, Artificial Sequence
  ENSG00000254489_20 (sequence is synthesized)
gccctgtccctggtccacattactctctctccttctccctcggatgatttatatctacacttaaattgccgagccacaaggatacaagtgaagttgacaatcaatatgaattaaggaaaa

SEQ ID NO: 1040173 - DNA, 120 bp, Artificial Sequence
  ENSG00000254489_21 (sequence is synthesized)
aatcagaagtctgagatcagaagtgtttgagtgaaattctccctacaagtcttggcaacctcatgattttgtttaattttccaacatgttttggattattggaaagagttacatgggata

SEQ ID NO: 1040174 - DNA, 120 bp, Artificial Sequence
  ENSG00000254489_22 (sequence is synthesized)
aaaaggatttgcctggcagagtaaaagaactgaatttggattgtactgaagtaggtcctaactaggctgttgatggtgaaatattgacgattctattgttttgaatgaatgagtgtcata

SEQ ID NO: 1040175 - DNA, 120 bp, Artificial Sequence
  ENSG00000254489_23 (sequence is synthesized)
ttttactgggaattgatttctgaacttcagtcaaggagtgactgaatttgcaattagagtcactctgttttgtaactcagattatgcaaggatcattctgaaacagcaaccaagatataa

SEQ ID NO: 1040176 - DNA, 65 bp, Artificial Sequence
  ENSG00000254488_0 (sequence is synthesized)
ctctttgctctgtgagaaaatttcaaatctgatctgctcagcttagcgactgaagattaatgctg

SEQ ID NO: 1040177 - DNA, 120 bp, Artificial Sequence
  ENSG00000254488_1 (sequence is synthesized)
aatctgatctgctcagcttagcgactgaagattaatgctgcctgatcacctcagaagccccctggaccatcacagatgcccaacttcaggtgactctcaagtggaggatccccagccaca

SEQ ID NO: 1040178 - DNA, 120 bp, Artificial Sequence
  ENSG00000254488_2 (sequence is synthesized)
ggacgatcagttcttgttaagaatctgaaccctcaaactctacaacctcgatggaccagaccctacttagtcatctgtagtaccctgactgctgtctgcctgcaggatcttccacactgg

SEQ ID NO: 1040179 - DNA, 120 bp, Artificial Sequence
  ENSG00000254488_3 (sequence is synthesized)
taccctgactgctgtctgcctgcaggatcttccacactgggttcaccattccagaataaagctgtgtccatcaggcagccagcctaatccctctcttcctcctggaagtcacaagtactc

SEQ ID NO: 1040180 - DNA, 120 bp, Artificial Sequence
  ENSG00000254488_4 (sequence is synthesized)
acccttatgagcctaatacatccctttattctattaggtctctccatccttaccctactttttgcagcacagctttatgaaatcacccccaccaattgggctgagccccaaaaagaaact

SEQ ID NO: 1040181 - DNA, 120 bp, Artificial Sequence
  ENSG00000254488_5 (sequence is synthesized)
gccccaaaaagaaactattcatccctactgtcttctatctagtcatactccattctcaactacctataaatgccctactcttatttacactgatggtttacactgtttcttcaagccatc

SEQ ID NO: 1040182 - DNA, 120 bp, Artificial Sequence
  ENSG00000254488_6 (sequence is synthesized)
tatctcttcgtgctatccccacaccaccactcttaagtctctcttagagtggatagatgatctttactggcagggcatcctcctatacttccatcctgatgaagttctattctttacttt

SEQ ID NO: 1040183 - DNA, 63 bp, Artificial Sequence
  ENSG00000254488_7 (sequence is synthesized)
ctcttattctcgttcccacattctctcctagccacttctaatccctccttagtgaacaactgc

SEQ ID NO: 1040184 - DNA, 82 bp, Artificial Sequence
  ENSG00000259684_0 (sequence is synthesized)
cagactgaagaaggtatactattagagaacatttgcagaaaagaattccacatcttttttttgagacagagttctgctgtca

SEQ ID NO: 1040185 - DNA, 120 bp, Artificial Sequence
  ENSG00000259684_1 (sequence is synthesized)
aaaaaaaaaaaaaaaaaaaagtatagctactattataatcctgtgaaaataatcaatataaaattaaaaatcaacagacagcccatattgcccttttttggcctaacaaaaaacagattt

SEQ ID NO: 1040186 - DNA, 120 bp, Artificial Sequence
  ENSG00000259684_2 (sequence is synthesized)
agacagtaagaaatcagtattaatttaaacattgtacaggacaggagatcaaaagcacaggtatacaaatggttcatttaaaaaaactgatactcaaattgacaccctgaaaatgtcaga

SEQ ID NO: 1040187 - DNA, 120 bp, Artificial Sequence
  ENSG00000259684_3 (sequence is synthesized)
cagaatgattaaactcactaaacatctgtaaacaataaatttatttcatttcttttaaagatttaatgatatacaaaacgtatatagtatctttaagtaatacactttttctttctcccc

SEQ ID NO: 1040188 - DNA, 120 bp, Artificial Sequence
  ENSG00000259684_4 (sequence is synthesized)
ttctccccacccccaatcaatattaaacactatttaaacagcttatcatctcttgccttgtctgtatctatgagatacactactaaatacaaataagctttatactgctcccttccaaat

SEQ ID NO: 1040189 - DNA, 120 bp, Artificial Sequence
  ENSG00000259685_0 (sequence is synthesized)
aagcccagctccgcaggagctacaggcgtgagacccaccgggacccgcgagcgggatcagggctgggggattagcagagccgcttgcgaggctgaccctctccaggatgccccatcattc

SEQ ID NO: 1040190 - DNA, 120 bp, Artificial Sequence
  ENSG00000259685_1 (sequence is synthesized)
cttccttctgagtacggggcaggactctctctgggatggaggggtcttaggacctgcaagcaaacaagggggagatgcattagagtgcagtgatacgatcacagctcattgcagccttga

SEQ ID NO: 1040191 - DNA, 70 bp, Artificial Sequence
  ENSG00000259685_2 (sequence is synthesized)
ttgatgcgcgtgacattttgtgctgtgacttggattgggggcccttccttgggagatcaatcccctgtcc

SEQ ID NO: 1040192 - DNA, 79 bp, Artificial Sequence
  ENSG00000259685_3 (sequence is synthesized)
gacttggattgggggcccttggagaaagatccaccacgaccttgggtcttcggaccaaccagcccaaggaacatctcac

SEQ ID NO: 1040193 - DNA, 120 bp, Artificial Sequence
  ENSG00000259687_0 (sequence is synthesized)
gctgggcgaaggctccgagccacgagacccccgcctcctgtcccgggacccacccaggcggaggcaagggcaggggcgctgggggcccagagagagggcgccgcgatggatgaatgagct

SEQ ID NO: 1040194 - DNA, 120 bp, Artificial Sequence
  ENSG00000259687_1 (sequence is synthesized)
gtttccagcattcctgcttcaactcaaaattttccttcatggcacagtggaaagctttgaagacggcggttctggggctgaatatgaaggcaactcggactaagaagacgactgctttcc

SEQ ID NO: 1040195 - DNA, 120 bp, Artificial Sequence
  ENSG00000259687_2 (sequence is synthesized)
aactgccctcccgtcctgcagccgcctgatttgaggaaggggctgggatccttccccttgccctctggttgttcttggagttacagcagccccgcggcagctctgccccctagtgcacat

SEQ ID NO: 1040196 - DNA, 120 bp, Artificial Sequence
  ENSG00000259687_3 (sequence is synthesized)
agaaaaaaaacccaagccaaaccaaaacacacgaaccattctagccttttctctctttcgtttctttctgaggatctggccgatttggatgcagaaaacatgcctgttgcttctgctgcg

SEQ ID NO: 1040197 - DNA, 120 bp, Artificial Sequence
  ENSG00000259687_4 (sequence is synthesized)
cgatttggatgcagaaaacatgcctgttgcttctgctgcgaaatctgctctttctcttcctgctatcggaaccctgtcccttctttcaaagcctaattcaggccaggcgcggtggctcac

SEQ ID NO: 1040198 - DNA, 120 bp, Artificial Sequence
  ENSG00000259687_5 (sequence is synthesized)
agagagagggcgccgcgatggatgaatgagctgtttccagcattcctgtgcgtctgctggttgtagctgcagtcaagatttggggcggtctcgtttgttgtgggtgggtgatctgggatc

SEQ ID NO: 1040199 - DNA, 120 bp, Artificial Sequence
  ENSG00000259687_6 (sequence is synthesized)
aggcatgagccaccgcgcccagccatcctatatgtcttttgaaatatggctgtacacaggctcagcacacagtgtgcacttatatactgtatttctttattggggtccaagtctgtgcat

SEQ ID NO: 1040200 - DNA, 120 bp, Artificial Sequence
  ENSG00000259687_7 (sequence is synthesized)
agcccctgtttattaattaattgattagcttccacagaaacaactgaggttttgcttcaataaaccttgcagaactcttagttctttagggactctggatagtgatctaatcaaatatgg

SEQ ID NO: 1040201 - DNA, 120 bp, Artificial Sequence
  ENSG00000259687_8 (sequence is synthesized)
ccttgcacagtaagtcatttcacaaagcaatttcacaagagaacactaacatcacccagagtgggatgaggaagtctgaaatttgaagtggactctcagaaagatgaggaaggtggcggt

SEQ ID NO: 1040202 - DNA, 120 bp, Artificial Sequence
  ENSG00000259687_9 (sequence is synthesized)
gctgtagacaggtcaaaggacaatgacttaggagaggtgggtctctgcttctgggatagaagacgcagcacgggccctagagttagcttcatatccagactctaccacttgctgtatgtc

SEQ ID NO: 1040203 - DNA, 120 bp, Artificial Sequence
  ENSG00000259687_10 (sequence is synthesized)
agcttcatatccagactctaccacttgctgtatgtccctgggcaagtttactcttctctctgtgcctcagttttctcctctgtaaaaaaaggccgggcatggtggctcctgcctgtaatc

SEQ ID NO: 1040204 - DNA, 90 bp, Artificial Sequence
  ENSG00000259687_11 (sequence is synthesized)
ttggggggccaaggtgggcggatcaccagcggtcaggagcttgagacgagcctggacaacatggtgaaaaaaggtgtggtggcacgcgcc

SEQ ID NO: 1040205 - DNA, 90 bp, Artificial Sequence
  ENSG00000259682_0 (sequence is synthesized)
ctgctttgagccactgcacccagccaattacgttatttttaatgctgaaaatgcacgttgatgacatttgccgaagtatgacgaacaagg

SEQ ID NO: 1040206 - DNA, 120 bp, Artificial Sequence
  ENSG00000259682_1 (sequence is synthesized)
cgaacaagggggtatctctgaaataccctcctaaaagagacgagaaatgaaaagctggttggtaagtgtttcaggaactttcagattgagagtaatgttaggaagtatttgctttcaagc

SEQ ID NO: 1040207 - DNA, 120 bp, Artificial Sequence
  ENSG00000259682_2 (sequence is synthesized)
agttttttttttctttttgagatgaagtcgctctgttgcccaggctggagtgcgttggctgagctgagattgcccccctgtactctagcctgggtgacagagcaaaattgtgtctttaaa

SEQ ID NO: 1040208 - DNA, 120 bp, Artificial Sequence
  ENSG00000233969_0 (sequence is synthesized)
atagttctatgggctatacaagaagcatggcaacagcatctgcctttgagaggacctcaggaagcttccactcatggtagaaagtaaagggggtgcaggtgcttcacatggtgagaaaga

SEQ ID NO: 1040209 - DNA, 120 bp, Artificial Sequence
  ENSG00000233969_1 (sequence is synthesized)
gatcaagagagagagccatgagatcatcattggatcttcactgtgagaaaccagtggtattcttggaggatattcacccttggaatcaagacaccatactgtgagtatgccaagcagcca

SEQ ID NO: 1040210 - DNA, 120 bp, Artificial Sequence
  ENSG00000233969_2 (sequence is synthesized)
catggaaaggccaatagagctgttccaagcacagcctcagctaggtcccaggagatgaccagcatcaagcaccagacaaagtacttcaatgactgtcatcttgtccacatccccagcttt

SEQ ID NO: 1040211 - DNA, 120 bp, Artificial Sequence
  ENSG00000233969_3 (sequence is synthesized)
tgcttggcttctagcaaatctgcttccttcctttgtccatccatgctgatggatggtaacagcaatagcaagaagctggatttttctcatcattcgttacagtatgtggattctcagata

SEQ ID NO: 1040212 - DNA, 120 bp, Artificial Sequence
  ENSG00000233969_4 (sequence is synthesized)
ttccaccacctatttaacaaattccatgtattacattatttatgttttaaatactgtaataagcctatcttttgtttccttggttggaccctacctgagtacaaatttagctaaaggaac

SEQ ID NO: 1040213 - DNA, 120 bp, Artificial Sequence
  ENSG00000233969_5 (sequence is synthesized)
ccagatacatagaggacaaggacatttggagttcatccatcatgtgtgaacttcttatccatctcctaaccaaggtgggagggagcatcattgatcaactgaattttggctagattgctg

SEQ ID NO: 1040214 - DNA, 120 bp, Artificial Sequence
  ENSG00000233969_6 (sequence is synthesized)
ctcatacatgactcagctggcccttagtattttgattatttctccaattctttagtgtgtatttggaataaattcattcaacatctctgaatatctggagctaggtttgtatgagaaggc

SEQ ID NO: 1040215 - DNA, 73 bp, Artificial Sequence
  ENSG00000260048_0 (sequence is synthesized)
ggatacaccttcacctactgctacttgcactgggtgcgatgggtccctggacaagggcttgagtggacaggat

SEQ ID NO: 1040216 - DNA, 120 bp, Artificial Sequence
  ENSG00000273211_0 (sequence is synthesized)
cataacccttagggctcccgtgaagctggagttcaccctgccatattccacagccctacattcccatgtctgctttggaggggtccggaggtctcagaatgggggggttgggacatttat

SEQ ID NO: 1040217 - DNA, 120 bp, Artificial Sequence
  ENSG00000273211_1 (sequence is synthesized)
acaggtgccctctcccccaacagccagaaagggaaaacagagccgagtttggccactggggcctccacagccctctggaagaaggggctgactgataggaaggcactcctctggtgttca

SEQ ID NO: 1040218 - DNA, 120 bp, Artificial Sequence
  ENSG00000273211_2 (sequence is synthesized)
ctggccagacccctgtgggctcagaagactacctagaccccatgaagaaagactctagacacatttttataatcagaaacttacagtttattgtgaataaaccactcaactttgagcaga

SEQ ID NO: 1040219 - DNA, 120 bp, Artificial Sequence
  ENSG00000238280_0 (sequence is synthesized)
tgggcgccagtggcttcaagggaagaccttgggacctggatagggttctccctcgcaccagaagtcatcggcctgtggggtctccaggagccacacctctcgaggcaggtcacaggccga

SEQ ID NO: 1040220 - DNA, 120 bp, Artificial Sequence
  ENSG00000238280_1 (sequence is synthesized)
gctggaggcctccttgggcctgaccggctccagcacccgatggatagctctctgaaagcgggaagcatgccttgttcagggcccactttatgccagacactgtgccagactggaatgcag

SEQ ID NO: 1040221 - DNA, 120 bp, Artificial Sequence
  ENSG00000238280_2 (sequence is synthesized)
agatgaggtcacagtccactccttatgaccactgcaaacaagaaaaggtaagagcctggaccaaggtggtagaaatgaagatgcatgggaggggatagaccagagagaggtttagagagg

SEQ ID NO: 1040222 - DNA, 120 bp, Artificial Sequence
  ENSG00000238280_3 (sequence is synthesized)
tccacagatgtacactggatgaaagtatgagaccaaatgacttagggtcttggcaaataaagatggcacactcaagggcttcagagactgaacactccatctctcactcctaccctctca

SEQ ID NO: 1040223 - DNA, 120 bp, Artificial Sequence
  ENSG00000238280_4 (sequence is synthesized)
tctgctggtgtcatccattggctgcactccatcagaccccccagtgggggacccagataatgcagcaagtggggccatcttcctcccccacagagcctggaacagaagagcctttttgtg

SEQ ID NO: 1040224 - DNA, 120 bp, Artificial Sequence
  ENSG00000238280_5 (sequence is synthesized)
gttccttttagttttgccaagcttggtgtgatcacactttcactattgaattgttagtagcattactgaagtacttggacaacacatcattatttagataaataaatatttattggttgc

SEQ ID NO: 1040225 - DNA, 120 bp, Artificial Sequence
  ENSG00000238280_6 (sequence is synthesized)
gctggaggcctccttgggcctgaccggctccagcacccgagacagactttcaccatgttgcccaagctggtcccacattcctgggctcaagggatccacctgccttggcctctcgaagtg

SEQ ID NO: 1040226 - DNA, 120 bp, Artificial Sequence
  ENSG00000238280_7 (sequence is synthesized)
ggatgaacacgaagcaatcaccttgggaaaaggagtgatgaaagtagaaagcactaaagagattctttatagttcttgatgggtagcctgagttgctcttgccatgtttttgtttgtttt

SEQ ID NO: 1040227 - DNA, 120 bp, Artificial Sequence
  ENSG00000238280_8 (sequence is synthesized)
ttttcactcctcaccgtatctttaaatcctatttttaaaaaaagtaatgaagaggtagccaagatgttcttcaacagatgaaaggataaataaatggtggtacatccagataatggaata

SEQ ID NO: 1040228 - DNA, 120 bp, Artificial Sequence
  ENSG00000238280_9 (sequence is synthesized)
ttaatcagttataaaaaggaatgagctactaagccatgaaaagacatggaggaaacttaatccatgttactaaattaaagaacccaatctaaaaaggctgcatactgtgtaattccaagt

SEQ ID NO: 1040229 - DNA, 120 bp, Artificial Sequence
  ENSG00000257682_0 (sequence is synthesized)
taactctagaaatgaaactgttcttctcattttttctttttatttttcttggtgattaattattgttctttcatggtttttctcttaaaatcatccagttgatctataaaaatgtattca

SEQ ID NO: 1040230 - DNA, 120 bp, Artificial Sequence
  ENSG00000257682_1 (sequence is synthesized)
acttattgtgtggaaacaccctgagaagaacaaagagaagtttaaataatgaggaccaggatatctgcaaccaaaaagcaatttgtgcttcattaattgttcacagaaataaagtatgtg

SEQ ID NO: 1040231 - DNA, 120 bp, Artificial Sequence
  ENSG00000257682_2 (sequence is synthesized)
gggagggggacaatatttgaagatttaaatggtcactgctactgctgcatttcttgttcattcaaagtaaaactagataatatttgtgtaagcagcaccttgttggttggataactgaga

SEQ ID NO: 1040232 - DNA, 120 bp, Artificial Sequence
  ENSG00000257682_3 (sequence is synthesized)
aatttaagttttggtttgcttgaagtttcaataagcttagggtcattctgaagcattaccttgtcatgaattttaaagataaaattcatattgatgatgatgataataacatccacatgt

SEQ ID NO: 1040233 - DNA, 120 bp, Artificial Sequence
  ENSG00000257682_4 (sequence is synthesized)
attagttttaattaagcaaatagaatgtgcaagtactatattaaatacttattcacagattacctccttcaccttcaaaacaatcctatacaaagtaaatgctattatcttggttttgta

SEQ ID NO: 1040234 - DNA, 120 bp, Artificial Sequence
  ENSG00000257682_5 (sequence is synthesized)
gatactgatagcctgtatttgttgagttctaattatgtgttcaattatcaacatcacaatgagatagttaccattttctagaaaagaaaatccaaacttagagtaagaaagtgatttacc

SEQ ID NO: 1040235 - DNA, 120 bp, Artificial Sequence
  ENSG00000257683_0 (sequence is synthesized)
agtcctgaaaatggaaaagcgtctggagttttgggtactcccaatgccccaattatccttttattaccctgatttacaacataacttcataggagacgttctgatgagcaaaatgacttg

SEQ ID NO: 1040236 - DNA, 120 bp, Artificial Sequence
  ENSG00000257683_1 (sequence is synthesized)
ggtaacaaaatgatctggcaaaaccagcaactaaggcaaggacacaagaagatggctgtctacaagccaggaaaagattctgcaccaggaactggatcaactggcaccttgatcttggac

SEQ ID NO: 1040237 - DNA, 120 bp, Artificial Sequence
  ENSG00000257683_2 (sequence is synthesized)
tatgagatgagaaataagtgtctattgtttaagcctcccagtctatggtattttgttatagcaacccaagatgacaaagacaacaagcctaaaatgaaaaatggcaaagtaaccaagatg

SEQ ID NO: 1040238 - DNA, 120 bp, Artificial Sequence
  ENSG00000257683_3 (sequence is synthesized)
tccttcaagagggctgtttgttgtccaaaaagcctttttccctaagcttgaaagcttaacttctcagaagcaggaagctgccttttgccaagagtaaatgggtgagaagtccaaaggtct

SEQ ID NO: 1040239 - DNA, 120 bp, Artificial Sequence
  ENSG00000257681_0 (sequence is synthesized)
cgtgggtgtgaagtgacatctcattatgattatcatgtcttcttaaagaagcaaacacaaccaaattcagaagaatttataaggctggtgtctgattgattgaaaaggccccaggaagtg

SEQ ID NO: 1040240 - DNA, 120 bp, Artificial Sequence
  ENSG00000257681_1 (sequence is synthesized)
gattttgccttcagagttcaactcctcctctggtgcagtcccaaaacactaggtggcatgagcagaacaaggaggcgtacacactgcaggcaaaactgcaaagaaaggggccactttcat

SEQ ID NO: 1040241 - DNA, 120 bp, Artificial Sequence
  ENSG00000257681_2 (sequence is synthesized)
aagagttaaaacccatctaaggagactttccaagactctctctggacgaccactgtgttcataagtgcccctgtacagcaggaagatggggtgatttgctaaggtcttttctagccttgg

SEQ ID NO: 1040242 - DNA, 120 bp, Artificial Sequence
  ENSG00000257681_3 (sequence is synthesized)
agattctgggattctagaattactcttttatagtaagacatgatctctgcaatgtcattgagatttatatgagaaaaaatgttctttaggggctatcaattaaaactttataccacaaaa

SEQ ID NO: 1040243 - DNA, 120 bp, Artificial Sequence
  ENSG00000257681_4 (sequence is synthesized)
gtctacccaagagaacccaggaactctgagcaaccacactggcttcagtcagcttgcaaaactggcttttaggcttgttacctgacatacattctagaaatgaaccttctttggtacaaa

SEQ ID NO: 1040244 - DNA, 120 bp, Artificial Sequence
  ENSG00000257681_5 (sequence is synthesized)
ctaaaagacatcattcccctgtaccccaagggaacctattcctagataagaatgcaaactcaccgtgaaggggtcgtaggaaggttctgggggagctgaggttgtgctctcatacaaggg

SEQ ID NO: 1040245 - DNA, 120 bp, Artificial Sequence
  ENSG00000257681_6 (sequence is synthesized)
gttcgagatattctcaggctgctgcttgccaagagctgcaacattaatgtcctcttccgactgtttggaaagacaagcatgaaagccaggagcatccccaaagcaggagcgtctcagcca

SEQ ID NO: 1040246 - DNA, 120 bp, Artificial Sequence
  ENSG00000257681_7 (sequence is synthesized)
agttggcaggtaaagcaagccaccctttgcctctgggagcttttccttttttaacagtactttgttgagagatgattcacatataataaaatttaccaacctttagattcagctcagtga

SEQ ID NO: 1040247 - DNA, 120 bp, Artificial Sequence
  ENSG00000197585_0 (sequence is synthesized)
gagactcaaagatgagctgagagattttccttcaaaatggaggacactgtcacaaacatgagaggttaaagaaggctgacttggaagaggaaaaaggcccaagtcattcctgactctcat

SEQ ID NO: 1040248 - DNA, 120 bp, Artificial Sequence
  ENSG00000197585_1 (sequence is synthesized)
ctgggaaactcttcagagacatgcagaggatgtactgattgctctgacctcctctcgtaaacaggcattctactggaacgtgtaagataatttttgccatctgtcattttcttcttcttg

SEQ ID NO: 1040249 - DNA, 120 bp, Artificial Sequence
  ENSG00000197585_2 (sequence is synthesized)
ttgggaatttccaagcataccaaatgactaccaggcaagagaatgttaagctataccagacaatttaatcacctgcatccaggatatgaaatccagaagtttcaatactattagcagact

SEQ ID NO: 1040250 - DNA, 120 bp, Artificial Sequence
  ENSG00000197585_3 (sequence is synthesized)
ctgaccatcagaatttttttttttttatacaacttacatttctctcatgagagtttaagtctgcttccttgtcttatactcagggaagatgaaaggcaggtaacatatcctgtaaaataa

SEQ ID NO: 1040251 - DNA, 120 bp, Artificial Sequence
  ENSG00000197585_4 (sequence is synthesized)
ttaactgtaaggttgttaagttattctcctgcctttgctattgcagtttaagtaaacagtaaattagtttaaacttttcctacatcattactttagttaatgaattctatttcttagagc

SEQ ID NO: 1040252 - DNA, 64 bp, Artificial Sequence
  ENSG00000197585_5 (sequence is synthesized)
aagactccatgggcgtcgtaggaccctctgagccagcataacaagagttccagcagaagaagac

SEQ ID NO: 1040253 - DNA, 120 bp, Artificial Sequence
  ENSG00000197585_6 (sequence is synthesized)
atggccatgtgaataattcttgtcaatgagaatgtgagtgaaactgatatgtaattgctggtctgaggcacttaagaaataaagtaagttttctgtgctttcctaacctcatggctggaa

SEQ ID NO: 1040254 - DNA, 120 bp, Artificial Sequence
  ENSG00000197585_7 (sequence is synthesized)
cctctgagccaggaagttgcgctgtacctgagagcaccgagatataacataagaagccatcttggaattaaagttgttgaatggaaatgtggcttcagcctggctgtgtatcacatcctt

SEQ ID NO: 1040255 - DNA, 120 bp, Artificial Sequence
  ENSG00000197585_8 (sequence is synthesized)
gatcaaatttgcaggtgaataatcatgacccaagtggaactgaggaaagtgtgctgaaacctgttggagaacccatacaaagaagttgggatgcagaaaaggaaggcagccagaatctgg

SEQ ID NO: 1040256 - DNA, 120 bp, Artificial Sequence
  ENSG00000283314_0 (sequence is synthesized)
gggggaaaacgattttatttttcatctgattaccatcattttctctctctctctcgggtctaagagtgggatggatgtaggaagaggaaggagttgtcctaatatgggttactgaaatgt

SEQ ID NO: 1040257 - DNA, 120 bp, Artificial Sequence
  ENSG00000283314_1 (sequence is synthesized)
tattggcccatgttaaatacagaaatggagggtttagaaatgtttaaggtgattttactttgccacagtgtccaagcacctgatcaatgatcctgtcttgatgaagagggcagtggtgag

SEQ ID NO: 1040258 - DNA, 120 bp, Artificial Sequence
  ENSG00000283314_2 (sequence is synthesized)
catttggggtgctgttgaatttgtgtggtggctcacacacactaggaccacatatcctccctcaaaattttggaaattttaaaaaactcatccttaactgcagagagtttataaaatatg

SEQ ID NO: 1040259 - DNA, 120 bp, Artificial Sequence
  ENSG00000283314_3 (sequence is synthesized)
ttgtcaaagataacatagccctagtcacatggtaaggaaaagccaacattcaagaaatgcttggaaactgagaaatgttaaaggcaggagtacaaaggaggtgaagagaatggtcactgt

SEQ ID NO: 1040260 - DNA, 120 bp, Artificial Sequence
  ENSG00000283314_4 (sequence is synthesized)
aggttgaggtgaaacaggaagtcgatccttggagatgaatcctcagagggtcttgaaaaaaaaagttggcaaatattaaggggtagaaggatgtttcaagagagaggaagccgtgagcga

SEQ ID NO: 1040261 - DNA, 120 bp, Artificial Sequence
  ENSG00000283314_5 (sequence is synthesized)
aggcatggaggcctatgcagaagatgtgaaggccatgcacattatttgctgattgaaatagaaaggtcaagagtctgggttctaccatttggcaaccgtcctaatgataattgattcaag

SEQ ID NO: 1040262 - DNA, 120 bp, Artificial Sequence
  ENSG00000283314_6 (sequence is synthesized)
tctcaaagtatccgccctccagattcttaatgacaaagcaaaactaataaccctccaatgataaaacctagcagataccaccttaactaactgatcagttagtgttacaagagatgagaa

SEQ ID NO: 1040263 - DNA, 120 bp, Artificial Sequence
  ENSG00000283314_7 (sequence is synthesized)
aaatccacagcatttgcctcctgatgtgatgcactggggaaaacacaacaacacaacatcatatttgtgttattcctgcaaaaaaaaaatagcataacctaaatctactcatgaggaaac

SEQ ID NO: 1040264 - DNA, 120 bp, Artificial Sequence
  ENSG00000283314_8 (sequence is synthesized)
atcacgcaaatgtcacttgaaaaacattctacaaaatagctggtccgtattcttcaaaaatgtcaatatcatgaaagacaaagattgaggaagtgttgcagattaaaggagactgcagac

SEQ ID NO: 1040265 - DNA, 120 bp, Artificial Sequence
  ENSG00000283314_9 (sequence is synthesized)
acgtgacaactgaatgcaatgcatgatgtgggattatcttttgctttaaagcaaaatgctgttctttaaaggacagtattgggacaattggtgaaatctgaataaggcctgtttactaga

SEQ ID NO: 1040266 - DNA, 120 bp, Artificial Sequence
  ENSG00000283314_10 (sequence is synthesized)
taaaggataaagacagaggaacaaataccagaccagcaaacttacctgaatccagctgccctcagagtatggctgaggcttggtcaaagcccagaacttagcaagggttagaggacatca

SEQ ID NO: 1040267 - DNA, 120 bp, Artificial Sequence
  ENSG00000283314_11 (sequence is synthesized)
tgggaccatattcccagtcactccagttgctgggagcatgaatacaatggctggagctctagttaccaattcagcccatggggacaatgccacactgatttaggaaatggcagagctgga

SEQ ID NO: 1040268 - DNA, 120 bp, Artificial Sequence
  ENSG00000283314_12 (sequence is synthesized)
aggagtctagaagaagacgaaagtttctccagattctattgagtgctgttattatagaagccctggccttcctatctctggcctatatgtgagagagaaacaaagcttgtttaagccact

SEQ ID NO: 1040269 - DNA, 120 bp, Artificial Sequence
  ENSG00000238282_0 (sequence is synthesized)
ggttgctgatccctgccttcaaggaatgctggccagttttctggagactcccagcctctcagctgagaccacaggtagttggtcagactctatactgcaggaggtaccctgtgcacatga

SEQ ID NO: 1040270 - DNA, 120 bp, Artificial Sequence
  ENSG00000287827_0 (sequence is synthesized)
tgtatattggttggaaataaaatcagtcccttgcatacatcagtctctctctgagacttttctagtccgttgggaaaaaatgtgaattcctctattaataacacattgtttaaaggcaaa

SEQ ID NO: 1040271 - DNA, 120 bp, Artificial Sequence
  ENSG00000287827_1 (sequence is synthesized)
cagttttgatatttcctgataaatggaggaacaaataaagaaacagtaggttataaaattactattgttatattatcatctatatattaatagtttttctttgtttatatatgtggacct

SEQ ID NO: 1040272 - DNA, 120 bp, Artificial Sequence
  ENSG00000287827_2 (sequence is synthesized)
ttgaaatcatgtaactcttgttttcatataggtgtgctgaagccctatccccaagatgactatatttggagacaggatttttggagaatctcactctgtcacttgggcgagtcttgctct

SEQ ID NO: 1040273 - DNA, 120 bp, Artificial Sequence
  ENSG00000287827_3 (sequence is synthesized)
ggccttaatttatctgcctgccttggctggctgggattacaggcctgagccacagtgcccagccttatagtgattttaatttagtatatactatgtatccatatttatccttgtttcctc

SEQ ID NO: 1040274 - DNA, 120 bp, Artificial Sequence
  ENSG00000287827_4 (sequence is synthesized)
cctctccatcaatatgtttctatatagaaagaacctgttttaactttgaatgttcagtatcaagtattaatataattattttaactttgattttattgcatttatcctggtatattttta

SEQ ID NO: 1040275 - DNA, 120 bp, Artificial Sequence
  ENSG00000287827_5 (sequence is synthesized)
tttttaatatttaatactttgttcttgtaaatagcaaatacatggattgtctttattttttcattaggaatatttcatcttttggtttagaaattcaaagcattcaagtttattaaggta

SEQ ID NO: 1040276 - DNA, 120 bp, Artificial Sequence
  ENSG00000250303_0 (sequence is synthesized)
ctccgggcgggcgtggtccctcttgcgggcgcctgggctggtcgggcggatcccggagagggggagccgcggggacgcagcgacagactcggggtgctggcagcggcagcccacgcctcc

SEQ ID NO: 1040277 - DNA, 120 bp, Artificial Sequence
  ENSG00000250303_1 (sequence is synthesized)
acgcctcccagggattgcaggcctgggcgccggggttggaccagtctcccgggcatggcacgccctggttattctgtacccgtgatttgtggcggggcaagacgttaagttgggtgacac

SEQ ID NO: 1040278 - DNA, 120 bp, Artificial Sequence
  ENSG00000250303_2 (sequence is synthesized)
cgaggtgagccacggtcctcggcaccagatgaggaaccactgtctcaataaggtctcagtgctgtgtgtgtaatggttaccgtgagagcttccctgcaatccgaatttgtgtgtctcatt

SEQ ID NO: 1040279 - DNA, 120 bp, Artificial Sequence
  ENSG00000250303_3 (sequence is synthesized)
ctcagtgacaccagtgatgctgttaaacaaggacaatccggttcatggattgtgacaacgcacgctgacatcaagcagaccctgccgtcaggtacagagggcaccacagtgaccaggaac

SEQ ID NO: 1040280 - DNA, 120 bp, Artificial Sequence
  ENSG00000250303_4 (sequence is synthesized)
tgctgtcctttcataccaggttttaggaggctttaccagaaggaatggaaaatgctggtgggcagtaagattgaaacagcatctgaggactggttctgcacaaaaccttaaattcttcaa

SEQ ID NO: 1040281 - DNA, 120 bp, Artificial Sequence
  ENSG00000250303_5 (sequence is synthesized)
ggactttgacatttgtttattcttgtaacaaattaaaacctatcctgtgtgttggttagagatcttcaaactgtaaataccttgaggcaggagtgaggtttttatcttttaaaggacagg

SEQ ID NO: 1040282 - DNA, 120 bp, Artificial Sequence
  ENSG00000250303_6 (sequence is synthesized)
cccctactctcctacgtaatgagtttctaaaaatggatgtgagcaccaatcaatatttctctggttgttaaagtcaagaataaaatggtatttttaagctcgcaactgtgtaggatgaat

SEQ ID NO: 1040283 - DNA, 120 bp, Artificial Sequence
  ENSG00000250303_7 (sequence is synthesized)
tctgtacacttttatttccctctgttctcctttcctatttgaaagtttattagtttgtggacttgggatcggattattcatgcattattttttgatgttgtatgtctcttggttcttggg

SEQ ID NO: 1040284 - DNA, 120 bp, Artificial Sequence
  ENSG00000250303_8 (sequence is synthesized)
tatttttgacacatattctgtcttgtaaccatagttaaacaattgttttagaccaactctctgtgtgtaattggcttcaacactcactgctagtcctttgacgctctgtttttttccatt

SEQ ID NO: 1040285 - DNA, 120 bp, Artificial Sequence
  ENSG00000250303_9 (sequence is synthesized)
ttgaaatatattttaaagtgatttaaagaatatgtgagtggcagacattctgaactcttttggttgtctgtcctcaaaaactaaaacttatttgtgagtaaaattttcatctaagtgttt

SEQ ID NO: 1040286 - DNA, 120 bp, Artificial Sequence
  ENSG00000250303_10 (sequence is synthesized)
tccatataaaaactctgtcagctactgctccattgtagtagacacaaaaaagtcagcacaattttcatccctccctccctcccttctcttccccttccccttcttgccctccttccttcc

SEQ ID NO: 1040287 - DNA, 120 bp, Artificial Sequence
  ENSG00000250303_11 (sequence is synthesized)
ttccttccttccttccttcctttttcttttgtttctgaatgtacaaagaaaacacttaaaaatttgcttgtaatttaaaaacttgtcaggatatttctggatttgagtgtttcttggtta

SEQ ID NO: 1040288 - DNA, 120 bp, Artificial Sequence
  ENSG00000250303_12 (sequence is synthesized)
ggatatttctggatttgagtgtttcttggttacttttacctggaacctggtgaactgagtccattcctctgtttgccctttctgtacttttttggaaagttttctttaattatatcttca

SEQ ID NO: 1040289 - DNA, 120 bp, Artificial Sequence
  ENSG00000250303_13 (sequence is synthesized)
attattgtttctcttttgattgttctagattcttcttcagaaacataactcttaggctcaatctctattcctggtcttccatagctatcgtcttctttttaaagtactgtattttattga

SEQ ID NO: 1040290 - DNA, 120 bp, Artificial Sequence
  ENSG00000250303_14 (sequence is synthesized)
atctaagctagtatttgttgtaagaagcactattattatatgtacaactaaggaagaaaaaatgctgccaattaaactgtgacataatgccatgattacagtcctgtgaaattgctgagt

SEQ ID NO: 1040291 - DNA, 120 bp, Artificial Sequence
  ENSG00000250303_15 (sequence is synthesized)
gccatgagaggacagtgacaaccttggggcctcatggtgaaggtggcagaaactttgttagcctgggtgctcagggtggacagctgctcttgccaaccgggaacatttgccttgagctct

SEQ ID NO: 1040292 - DNA, 120 bp, Artificial Sequence
  ENSG00000250303_16 (sequence is synthesized)
tttgtaagtgacagataagcttttattgtacttcagccaagatacaaacattggacgtatttgtacagcagctaaaggtactataataatacatattctgaaatcactatgtaccctaaa

SEQ ID NO: 1040293 - DNA, 120 bp, Artificial Sequence
  ENSG00000250303_17 (sequence is synthesized)
atattttaacaaaattcttgcaatatttgtatgagaactgctggattttgctttcttaccaaatttgctgttgctactgaaaaaagagaataacttggacaatgaaatgatctcaaatga

SEQ ID NO: 1040294 - DNA, 120 bp, Artificial Sequence
  ENSG00000250303_18 (sequence is synthesized)
ggcccctccagacgatggccattcctgttgccttggtccgcaggaacgatgggttatgcatgaactttgtagaacatggccttgtcttcaccaacgcggaggagagcccgttcggttcca

SEQ ID NO: 1040295 - DNA, 120 bp, Artificial Sequence
  ENSG00000250303_19 (sequence is synthesized)
gagaggatgctgcctcatctcgtctctaaaagaggaggaaggggagcaggtcccttcacgttctctggtctcagctgagaactctccctggaagtagcgggccgtgaaatgtttcacaag

SEQ ID NO: 1040296 - DNA, 120 bp, Artificial Sequence
  ENSG00000250303_20 (sequence is synthesized)
gcaattctttttgcatgagtctcagttacaaaacataacacagtttctacttaaggataccttcttttcttgggtcctgtcaagcacttagtttaaaaaaaaaaaaagaattgcagtggt

SEQ ID NO: 1040297 - DNA, 120 bp, Artificial Sequence
  ENSG00000250303_21 (sequence is synthesized)
tggtccaataatagacatttgcttcagtaatatcaaattacatcctgctgcttgaattccatgcctttctgcatacataataacttctcatttcaatgccaaaccatagtgtaatctttt

SEQ ID NO: 1040298 - DNA, 120 bp, Artificial Sequence
  ENSG00000250303_22 (sequence is synthesized)
aaaagacattttaaatggcaattaaactcacatgtaattgcaacaatgtatacaactcaattaaagtgctaacaacatgaacaactgagaccaagttcacccatgcccaggtcttgatga

SEQ ID NO: 1040299 - DNA, 120 bp, Artificial Sequence
  ENSG00000250303_23 (sequence is synthesized)
cctcaccatggcagctccctggcccagggtgattataagatgccagtgattgcaagacttggcctgatttcagaagtgatgatgtggcaacacagacatcttagaattaaggaaatagtt

SEQ ID NO: 1040300 - DNA, 120 bp, Artificial Sequence
  ENSG00000250303_24 (sequence is synthesized)
ttaattcttggtgctctttcttggcattctgaaagtgttcctccagtttgccatctaagatattccttagttttctgccatgtccatttcactcatttactccttcctatatgactttta

SEQ ID NO: 1040301 - DNA, 120 bp, Artificial Sequence
  ENSG00000250303_25 (sequence is synthesized)
attattgtttaataatttaattttcttgggaatatctttctcttgttacaaccagtttcctttatatcttttcttggactccattggccaaattctctttcataagcctgaagcccctaa

SEQ ID NO: 1040302 - DNA, 120 bp, Artificial Sequence
  ENSG00000250303_26 (sequence is synthesized)
tatttaccctgagactgtattctagttagtagaatgtgaatggaggtgatgtgtgtgacatataggacttccccataagagcctttaatgagttgtcctctgttctctttcccctcttcc

SEQ ID NO: 1040303 - DNA, 120 bp, Artificial Sequence
  ENSG00000250303_27 (sequence is synthesized)
gcaatccacaacctacctcctctgcatcccagttttgctccagagaagttcacgaggtggattggcctgatgggtcctggctccactgggaagacccctgggagaatctgaatcttcttg

SEQ ID NO: 1040304 - DNA, 120 bp, Artificial Sequence
  ENSG00000250303_28 (sequence is synthesized)
gaggatgggtctctgctctgcttctagttctccacctccaggttgggagagggtcctgacaccaaaagttcatttcagaatctgcctttcagcccttccttctggtcaaaggtgtgagta

SEQ ID NO: 1040305 - DNA, 120 bp, Artificial Sequence
  ENSG00000250303_29 (sequence is synthesized)
tggctggcatgatgggatggagagaacatgggcttctcaatccccaatctaccactagtaagctatgggagctgcaatcctctcagacctccgtttcctattcataaaaatgggaacaat

SEQ ID NO: 1040306 - DNA, 120 bp, Artificial Sequence
  ENSG00000250303_30 (sequence is synthesized)
aacactaccctcatgggactgcttctaggtgcagtgacagggcagcggcaccatctaacacattaaaatgtcagtttttcttgctaataccataaggagatttaaaatataaatgtatct

SEQ ID NO: 1040307 - DNA, 120 bp, Artificial Sequence
  ENSG00000250303_31 (sequence is synthesized)
ataaattcccggaccccagtgttgccccgttgaatagaaactactggaggttgggttctgagaatgtgaatttttgaggcactcccagtgagactctgagaagccgcgatgtttgggaat

SEQ ID NO: 1040308 - DNA, 120 bp, Artificial Sequence
  ENSG00000250303_32 (sequence is synthesized)
gacagcttttccattcttcaattccagatgctattcataatgagatgtgctaccgataacaacttctcaggaaaaaatgtgtgaattaccaattacatttatacatttcaacctcagact

SEQ ID NO: 1040309 - DNA, 120 bp, Artificial Sequence
  ENSG00000250303_33 (sequence is synthesized)
cattaaaaattgcacccctggactgtgcattgtctcagctgtggtcacaggactgaaggagaagtctatgtggtgtgaggcaataaccatgactgtgattagacggcagcctcgatgatc

SEQ ID NO: 1040310 - DNA, 120 bp, Artificial Sequence
  ENSG00000250303_34 (sequence is synthesized)
acctggtatatgccatgctgggaggccactgagaatgctctgcatcatcccccaggcctgggatgcagagtgtcggggaatcagtcctgtgtctctcttctccagcatctctcagctgga

SEQ ID NO: 1040311 - DNA, 120 bp, Artificial Sequence
  ENSG00000250303_35 (sequence is synthesized)
tgcaccgggctgtctttgtggttcagaccttcaggagccaagccaaattgagtcagagcatgctcctcagtgtctgccccaccactgagaggggtcagccttcacctggcatctggcaca

SEQ ID NO: 1040312 - DNA, 120 bp, Artificial Sequence
  ENSG00000250303_36 (sequence is synthesized)
gttggctgagtccctaggactgtacttgtgcgttgatttccctcttcggttcattgtatttgtcaggattcaggcaggaaaacacaaaccaggcttggtgtatctgatagaggaatttaa

SEQ ID NO: 1040313 - DNA, 120 bp, Artificial Sequence
  ENSG00000250303_37 (sequence is synthesized)
cactggctatagaatgtgtagatgttggaaggctgggatggcaagagggagactgtgaggtggcccagggcttatgacctatagaaagctgctgccccagctaaggctgggggaacaaaa

SEQ ID NO: 1040314 - DNA, 120 bp, Artificial Sequence
  ENSG00000250303_38 (sequence is synthesized)
agaaggagggttatcattaggatttgggatgcagaggaggagccgtagcctcgggagcattgctgtggaggagggactgctgcagctagagctgagatgatggaaatagcacagctgctt

SEQ ID NO: 1040315 - DNA, 120 bp, Artificial Sequence
  ENSG00000250303_39 (sequence is synthesized)
gagagacatcacctggagaagaaggaacgagagaaagagtgagaggaatagaagatcaacactactctcccagcatctcttattgagagagcttgtgaagaagtcagctggcaaaggagc

SEQ ID NO: 1040316 - DNA, 120 bp, Artificial Sequence
  ENSG00000250303_40 (sequence is synthesized)
caagtgtgactgagcagtgtgcagagagtgtggtgggcctgggagacaataggcaaacaatgagtacattcaggcagtcagcacaaatttactaagtacctttttttttgagactgagtc

SEQ ID NO: 1040317 - DNA, 120 bp, Artificial Sequence
  ENSG00000250303_41 (sequence is synthesized)
ttatgggcgtgagtcactgtacctggcctactaagtgccttttaaatgccagacactgttgtgatgctggggggtgagcagggaacaaaacagaaaatctcctgccatctaggagccagc

SEQ ID NO: 1040318 - DNA, 120 bp, Artificial Sequence
  ENSG00000250303_42 (sequence is synthesized)
atcttagttggggagacagtcagcaaacataaaaaaagtaaaatatgtaatctcttaaatggcagtaagagctatagagaaaaatgaagacaggaaaggggcagagagtggtgggaatga

SEQ ID NO: 1040319 - DNA, 120 bp, Artificial Sequence
  ENSG00000250303_43 (sequence is synthesized)
gggggtgggcaggaaaggtctcactaagaacagtttaagcaaagacctggaagaagccaggcagcgagccccgaggctcttcggggaagagcatggcaggcagagatacagcaagggcaa

SEQ ID NO: 1040320 - DNA, 120 bp, Artificial Sequence
  ENSG00000250303_44 (sequence is synthesized)
aggccttgaggcctgccttggtcaaggaaaaataaagaggcctgagcagagtgtgcgaggggagaagaagtaggaaatgagggcagggggatacagctgagcagtttgggctccagaaat

SEQ ID NO: 1040321 - DNA, 120 bp, Artificial Sequence
  ENSG00000267489_0 (sequence is synthesized)
gacaaccttctgtggtaaggggtgaacatccttgggaagccacagagagcaaggcgcagtttttcattgatcaccactttcaagatgctcccagaatcgtgctgtctaggaagccattta

SEQ ID NO: 1040322 - DNA, 120 bp, Artificial Sequence
  ENSG00000267489_1 (sequence is synthesized)
aactggtgagaagccatcctctcttgaatgggggctcccactgtacatctggcacccacttcacagattctgggggatgtcaacaccagcactgctgagctgtgtgaccttgagcaagac

SEQ ID NO: 1040323 - DNA, 120 bp, Artificial Sequence
  ENSG00000267489_2 (sequence is synthesized)
agttagcctctctgaacctcagtgtccttctctgtaggctggagattgatataccttcattatcggggtatgagagtgttataaggtgggatggtggaacacgctgactggtctgggcta

SEQ ID NO: 1040324 - DNA, 120 bp, Artificial Sequence
  ENSG00000267489_3 (sequence is synthesized)
ttcaagatccatgaactggaagatgctttcttataactcagagaaaagagatgaaaatgaatcaaagaacaggaaggagacaagctcaggagagtcaccctaagaaggatgtgtggaaga

SEQ ID NO: 1040325 - DNA, 120 bp, Artificial Sequence
  ENSG00000267489_4 (sequence is synthesized)
cttgactggaggatcaaaatgtgtcgggggaaggtgtacaaggaggagtaaggacacagatgtcctgacttcacacagtgggggattagaagccaccatcaaacacagatgaaacaggaa

SEQ ID NO: 1040326 - DNA, 120 bp, Artificial Sequence
  ENSG00000267489_5 (sequence is synthesized)
taaaagtagtagtacattacttaagctttaaaagggtaagactcctgggaatttggaagctgagacttgaggcaagtatttaggatttgctgtctcacctccctgctatgacagtcctta

SEQ ID NO: 1040327 - DNA, 120 bp, Artificial Sequence
  ENSG00000267489_6 (sequence is synthesized)
attaatggagatgatggagaacagcttgctgggctgagtggcaggagccatgcagctgctggggctggagtgggtcaggaagcttcatcaatctgggacacatgacgtgcttggtggtgg

SEQ ID NO: 1040328 - DNA, 120 bp, Artificial Sequence
  ENSG00000267489_7 (sequence is synthesized)
cggagcctgacgcatccctcttcatcgacattgtgtcaataggagcagaggcatttagctgtgtaaacacagagcttcagtggcagcaccctaaatgcttagctgatagatccggaatta

SEQ ID NO: 1040329 - DNA, 120 bp, Artificial Sequence
  ENSG00000267489_8 (sequence is synthesized)
aatacagacctagaaactggagttggaaaacttcctggcagcactccttccctgccatcccggtgatccccttctggatggagggtgtggagctcagcacattcacgtctgcagttctca

SEQ ID NO: 1040330 - DNA, 120 bp, Artificial Sequence
  ENSG00000267489_9 (sequence is synthesized)
gagaaccaagtgttaaggaatgtcagggaaggaagaaggcagccagccaggaaggggaggtcctggcctgagcacgccaggcacagagggatagagggtagggaggaaactgcacctgtc

SEQ ID NO: 1040331 - DNA, 120 bp, Artificial Sequence
  ENSG00000267489_10 (sequence is synthesized)
tccaaccctcgaccccagccccgaaacacgacattggctgaaacagattaaaagcataaaatggcccaaagaaatgggagaaggttggcctctggtcgggcaaacatgagggcatgaaga

SEQ ID NO: 1040332 - DNA, 120 bp, Artificial Sequence
  ENSG00000267489_11 (sequence is synthesized)
tatataatgtcccacacgggaggaaacccttgccgggcccctcaggatttataacaagctcacctgaaggagaaacttcaggggcacttacaccatcagatacctagaaaggagctgtca

SEQ ID NO: 1040333 - DNA, 120 bp, Artificial Sequence
  ENSG00000267489_12 (sequence is synthesized)
gtaaaaggggtttaatttgaaaacactgaaacatcgtgttcgctcaaaaccatgacaattgcagttttattgtctccactcaggaaaatgtgtgtctggatcatcttgtggcccgaatgg

SEQ ID NO: 1040334 - DNA, 120 bp, Artificial Sequence
  ENSG00000267489_13 (sequence is synthesized)
ggagaaaagcagcacaagaatggaatagtacagtggctacgaacacagaaaccacactccaggcccagtccccggcagtggcctccaggacccactctgagctagatcacatcagtgatg

SEQ ID NO: 1040335 - DNA, 120 bp, Artificial Sequence
  ENSG00000267489_14 (sequence is synthesized)
ggctggccaatctttaaggagaatgactctactcttaggaagccagcaggttggaggaggaaacacattcaaatcccgagcacaaggagctgggagaagaccggttatgggagcggcatt

SEQ ID NO: 1040336 - DNA, 120 bp, Artificial Sequence
  ENSG00000267489_15 (sequence is synthesized)
cctggaagctctgaagtcacagccccactgatgaaaggctgggtgtatttattttcttttgctctcaaaattattttggaattatgacttaccattaatacttgaaaagtgatcaaatag

SEQ ID NO: 1040337 - DNA, 120 bp, Artificial Sequence
  ENSG00000267489_16 (sequence is synthesized)
aggaaagcattctaaaggtggagaaagagatgtgcagctaacaggagacatttatgcgttatttcaccagcccacaagttcaagttctaggagttgaaatggcaaaggcctgaggacttt

SEQ ID NO: 1040338 - DNA, 120 bp, Artificial Sequence
  ENSG00000267489_17 (sequence is synthesized)
cagcattttgtcaacactgaccaagcgaacagggtgctgttcacaatccaagttcgcaatccaagtgcatgctgtctttggattaaatggtttatgcagattggtcttggttcttctgta

SEQ ID NO: 1040339 - DNA, 120 bp, Artificial Sequence
  ENSG00000267489_18 (sequence is synthesized)
cgttctgtattggggagggatgatgagtggatggacatcttgcagataagaccccttgcccagtatactgtggggttcactgtagttgtggaggaagacctttcagtttgggggcagagc

SEQ ID NO: 1040340 - DNA, 120 bp, Artificial Sequence
  ENSG00000267489_19 (sequence is synthesized)
acaatttttgtgtccctttactcaaaatgctaactcagtctgatctctggtaggtgtcctgaattgtctttaaaaagtgatcgagattatattttcaattttgaatatactgctgaaccc

SEQ ID NO: 1040341 - DNA, 120 bp, Artificial Sequence
  ENSG00000267489_20 (sequence is synthesized)
ctgacatgcagagcaatctatctggactgaaaacttggccagggatggtctatgccaagcagtgaaggctgtgaagagatgcttgggaagggtacaagaaggaaggaaaggagccccctg

SEQ ID NO: 1040342 - DNA, 120 bp, Artificial Sequence
  ENSG00000267489_21 (sequence is synthesized)
ggacaatgaaggaagatgctgtggttggccccggggctcagaaaacaggcaggtgaaggagtggaaaatgatcactttgatccaaggaaccacctgccccactacaagtgaacaccagct

SEQ ID NO: 1040343 - DNA, 120 bp, Artificial Sequence
  ENSG00000267489_22 (sequence is synthesized)
gacccagtgctgaccgtgtttatcttctgcctcagttttcctcaaatgtacatgcaaaagatattagatggcttccacaaaggctctatgcatatgagaatccctgttcacaaacacaaa

SEQ ID NO: 1040344 - DNA, 120 bp, Artificial Sequence
  ENSG00000267489_23 (sequence is synthesized)
gccctgttgacaagaagacaatgagcctcgaggaaagatgaaagaaagaaaattaaggaaaagaggaaaacaagcaaaaaactcagcaaagatgtcattgcataatagtccattatgcct

SEQ ID NO: 1040345 - DNA, 120 bp, Artificial Sequence
  ENSG00000267489_24 (sequence is synthesized)
ccaattgagccgtcatgaactatcaaagaaataattgcgcaataagcccataatggcttaatcgtgtcaacatctttgcatttacatatttttttaatcaatggaaattaagtacaaaaa

SEQ ID NO: 1040346 - DNA, 120 bp, Artificial Sequence
  ENSG00000267489_25 (sequence is synthesized)
aggcagttgaacgatatggacaggtgaaggctccgtggggactggcccagctcgcggagagctggagggggtaatgtcattgcatgtacacagtttaagacagagcatctggtgattctc

SEQ ID NO: 1040347 - DNA, 120 bp, Artificial Sequence
  ENSG00000267489_26 (sequence is synthesized)
ggaccttcaagcaagtgtcacatctcaggtgaaccttggcagttttaagatgaacaaagtaatcaaagcaaaaatgtcaaataataataataataatgatatcagaagaatgtccagtgc

SEQ ID NO: 1040348 - DNA, 120 bp, Artificial Sequence
  ENSG00000267489_27 (sequence is synthesized)
catggttggattcccagaaggcagcatctgctcatgccatcaacaacatggtgccatttcagtcatcctctttttgtcccaaagacagaaaaaaaatagaaaaaagaaagagaaaaagac

SEQ ID NO: 1040349 - DNA, 120 bp, Artificial Sequence
  ENSG00000267489_28 (sequence is synthesized)
tctatcctcctgggtgtgaggtttggagggcctctcgtcaaaactttggagggctctgtcagtttgaaaagaacatgacctttaaattgtatcagtatgtttgctggtgcataagggaga

SEQ ID NO: 1040350 - DNA, 120 bp, Artificial Sequence
  ENSG00000267489_29 (sequence is synthesized)
ggaaaaggttcgtcctgatggaaaaccactcagaagccaaggagtaattcagagggaaccagcccaggaagaatcaagaaagctgcccacagtgtcattcttcagctgagaaaagagaga

SEQ ID NO: 1040351 - DNA, 120 bp, Artificial Sequence
  ENSG00000267489_30 (sequence is synthesized)
gttgactaactcctcggactggagtgaggactcacagaggtggtaggacactaaccatctatgtctccatttcctgggttgtaacactgaggtagaacatctcactgtcccatggaggat

SEQ ID NO: 1040352 - DNA, 120 bp, Artificial Sequence
  ENSG00000267489_31 (sequence is synthesized)
tatgttatttttggagattaataattttggaggaagaaaggtggcttcctgaaaaggaagtcacatgaagaagcaacttacacggtggtctctttaaataaacatattgtgactagacaa

SEQ ID NO: 1040353 - DNA, 120 bp, Artificial Sequence
  ENSG00000267489_32 (sequence is synthesized)
aggaatattcctgatttccactggatgactttgactggtatgatttcattctctgaaagtgttaaccagggtgcagcatggccagaaaccattccgagcctcatgaagtgggcaagtcag

SEQ ID NO: 1040354 - DNA, 120 bp, Artificial Sequence
  ENSG00000267489_33 (sequence is synthesized)
ggccacgtgacagggaattgggtgtagactctaggaactgaggtcttaatcctacaactgcaaggggattaaagtctaccaacaaccacctgggcttggaagaggaccgctgatctccag

SEQ ID NO: 1040355 - DNA, 120 bp, Artificial Sequence
  ENSG00000267489_34 (sequence is synthesized)
atgagaacggagcctgaccaacaccttgagtgccaccttgtgagactctgagcaaagacccagctaagccacacttagactcttgacgtacagaaaatgcagaagaggagaaggaagagg

SEQ ID NO: 1040356 - DNA, 120 bp, Artificial Sequence
  ENSG00000267489_35 (sequence is synthesized)
gtgaaaacggattaatacggattccattagcagaagcagttttggtgggaaaaagatgaagggtgaagaggacttttaccttaaaacaatgaagagtcaccctaagaaggatgtgtggaa

SEQ ID NO: 1040357 - DNA, 120 bp, Artificial Sequence
  ENSG00000267489_36 (sequence is synthesized)
aaaagatgtttaagaagttgctgatgaagaaaagttcaggattcacagctccatacaaagggaatagccacttttctcattttgagatatgactactaacaagtattattctgcatcttc

SEQ ID NO: 1040358 - DNA, 120 bp, Artificial Sequence
  ENSG00000267489_37 (sequence is synthesized)
ggcattcaaggttggtctggccccaagaactgtacagcagcagcagcagttcagctggcagaggtgctgttgctgagctgggagtggaaagcacattttctcttcatgatagatggtgta

SEQ ID NO: 1040359 - DNA, 120 bp, Artificial Sequence
  ENSG00000267489_38 (sequence is synthesized)
gtattggctttgacttttcagaaggcttatctgttagatggtgtttgtcactgggccgcggagctgtggatgttcgtcagttggaagttgcaggcagttgaacgatatggacaggtaatg

SEQ ID NO: 1040360 - DNA, 120 bp, Artificial Sequence
  ENSG00000267489_39 (sequence is synthesized)
ctccaataaaacatgtcagagtcgattaaggacatttttcaatgaggtataattcacagattttagtagcgaatccaagagcactgaagtattaaagaggctgtgaatacttaattaagg

SEQ ID NO: 1040361 - DNA, 120 bp, Artificial Sequence
  ENSG00000267489_40 (sequence is synthesized)
ctatgttaccatcctacctttgcctgaattcacttaacgctttggagctctgctctgaaaacgcacaatttgtctgatggcggggtcggaggagtagcaggtaatgtcattgcatgtaca

SEQ ID NO: 1040362 - DNA, 120 bp, Artificial Sequence
  ENSG00000267489_41 (sequence is synthesized)
catcctctcggtgcttccgtagttatcaagtaaaagtccttctaagcctaagaaatgatagtattaattcagtcttggggtgtggggggaaaggtggactatcatcaaataaaaaaggcg

SEQ ID NO: 1040363 - DNA, 120 bp, Artificial Sequence
  ENSG00000267489_42 (sequence is synthesized)
aggctaattaagtgacatccactggggactgggaaaagaagagacttcttgtgggaaagtaattatatcttcattgaccctcctggggtacccccagtggcagggactctgcctcgcggt

SEQ ID NO: 1040364 - DNA, 120 bp, Artificial Sequence
  ENSG00000267489_43 (sequence is synthesized)
gtgacatctcctttcgggatgagcagccagtcacctcgagaagcccccttctccatggatgcgttttctaatcatttcacatgattgagcctccagcaagtgatgctttacttaattcct

SEQ ID NO: 1040365 - DNA, 120 bp, Artificial Sequence
  ENSG00000267489_44 (sequence is synthesized)
gggagtgggagggtgattaacaggggaagaattaggaaagaggacacgcaagaccacagtaagagatggaaataagagaatattcctgatttccactggatgactttgactggtaatgtc

SEQ ID NO: 1040366 - DNA, 120 bp, Artificial Sequence
  ENSG00000267489_45 (sequence is synthesized)
aaacaaacaaacaaacagaacatatttcctgaaaaaggctatgtctttctgtttgaatgacaatgcataggactgactgaactcctcattttgagtcaccctaagaaggatgtgtggaag

SEQ ID NO: 1040367 - DNA, 120 bp, Artificial Sequence
  ENSG00000267489_46 (sequence is synthesized)
ggtggcctggaaattctcactcctaaggcacaagggaacctctctcttgcccactgggtcctcagtagcttgaacacagacctgtggcttctctccctgtgtcctcctctgcatccttga

SEQ ID NO: 1040368 - DNA, 120 bp, Artificial Sequence
  ENSG00000267489_47 (sequence is synthesized)
acaatttgtctgatggcggggtcggaggagtagcaggtaatgtcattgcatgtacacagtttaagacagagcatctggtgattctcggaccttcaagcaagtgtcacatctcagggtgtg

SEQ ID NO: 1040369 - DNA, 120 bp, Artificial Sequence
  ENSG00000267489_48 (sequence is synthesized)
cactgatgaaaggatgtaagaacctaagagtggaaacctgcccctgggattcatatggtgtcccctcaggactcaaaccctggtctggtatgctcagtaaatgaatgaatatacccacta

SEQ ID NO: 1040370 - DNA, 120 bp, Artificial Sequence
  ENSG00000267489_49 (sequence is synthesized)
cagatcaaagtctacatttattacatcagaagagctgtttctgcatggacttggcagttgtctaaaagaatatcagaaattaagaagaatggagcataagtaaacaatgattctctttca

SEQ ID NO: 1040371 - DNA, 120 bp, Artificial Sequence
  ENSG00000267489_50 (sequence is synthesized)
acagcagcagcagcagttcagctggcagaggtgtgctcttgaaccactcttcacatgtccatattatcttctgggtattctcctgagctcagaggcaccagggccccagcgaagtcacct

SEQ ID NO: 1040372 - DNA, 120 bp, Artificial Sequence
  ENSG00000267489_51 (sequence is synthesized)
tgaatcaaagaacaggaaggagacaagctcaggaggtcaactctccaccttcccacccactctgtgcctggaagggtgactcctctggccacctctggcttcttgcttggtgtgatcaaa

SEQ ID NO: 1040373 - DNA, 120 bp, Artificial Sequence
  ENSG00000267489_52 (sequence is synthesized)
ggagactggaggatgcaaggagagtgaagcggtatttatttctggttctgggtttctgcaacttctctctgccctttccccttgcgcccagccagtgtttaaatccaccactatccctgt

SEQ ID NO: 1040374 - DNA, 120 bp, Artificial Sequence
  ENSG00000267489_53 (sequence is synthesized)
ggtcttccaataccctgacctcacctttgtggataagggactgtttactcaatccaggcttcaggctgtttcctacagctacccatctaaaagcctaagaaataaaacaaaataaaagta

SEQ ID NO: 1040375 - DNA, 120 bp, Artificial Sequence
  ENSG00000267489_54 (sequence is synthesized)
gtacagcagcagcagcagttcagctggcagaggtgctgttgctgagctgggagtggaaagcacattttctcttcatgatagatggtgtacctgcacgtgggaaggtaatgtcattgcatg

SEQ ID NO: 1040376 - DNA, 120 bp, Artificial Sequence
  ENSG00000267484_0 (sequence is synthesized)
tggcctgtatgcagttgtgggtgaagtttattaaggcaatactgaataccagagcatttcaacaaggcttaccacacaggcccacttagaccagaaatcccaagtccattagctacaggc

SEQ ID NO: 1040377 - DNA, 120 bp, Artificial Sequence
  ENSG00000267484_1 (sequence is synthesized)
cccacttagaccagaaatcccaagtccattagctacaggctgatattcagggacatcggtgtaaacaaagaagtgggatatgaactatatccctgatttttttttctttttttttttttt

SEQ ID NO: 1040378 - DNA, 62 bp, Artificial Sequence
  ENSG00000267484_2 (sequence is synthesized)
aagagattctcttgcctcagcctcctaactgggataacagacacctgctaccatgcccggct

SEQ ID NO: 1040379 - DNA, 120 bp, Artificial Sequence
  ENSG00000267481_0 (sequence is synthesized)
gacaaaataaccattctgtatattggatattgacttctattgacaaaatagccataacaatattctgatttagaataatactccttttctgctgtatatttgcaagcttttatcaaatat

SEQ ID NO: 1040380 - DNA, 120 bp, Artificial Sequence
  ENSG00000267481_1 (sequence is synthesized)
tacgggagctcaatagaaatcaacaatatgaatctttatttaccacaaacattattgatgcctatgcttgtttttcttaaaatctattagctttttatgacacatttatactttttcagt

SEQ ID NO: 1040381 - DNA, 120 bp, Artificial Sequence
  ENSG00000267481_2 (sequence is synthesized)
tgtttattactgagaagtggctgtcctgccagaaaactgctattctcagctgtatccacaatgactaatagtgagtggaagtgcagtggataaaagcaaatgtgtcttctctgtattttt

SEQ ID NO: 1040382 - DNA, 120 bp, Artificial Sequence
  ENSG00000267481_3 (sequence is synthesized)
atcagacaaaaaaccccataggagattttttttttttttcattattgtactctctgcttctatgagtttaaatttcttttacacttcacatagaaataaacctaggtttcttattagaag

SEQ ID NO: 1040383 - DNA, 120 bp, Artificial Sequence
  ENSG00000267481_4 (sequence is synthesized)
atagactgtgatactgaaagcaaataaaatggtacatgttacctggctgcatttcaaacaggtgatggtgacactgcactgaagcaccaaaggtgattcttgttggccaggccagagctc

SEQ ID NO: 1040384 - DNA, 120 bp, Artificial Sequence
  ENSG00000267481_5 (sequence is synthesized)
cttgtgaaaaaggttaggcccactggtatgtctgaagcgtcctagctggatggacagaaccccatgagctgttttgattagactctgaatttaaaacaccttggtgcccagtaatgagga

SEQ ID NO: 1040385 - DNA, 120 bp, Artificial Sequence
  ENSG00000267481_6 (sequence is synthesized)
cattttcacatttagcataacgtgatttggtgtgtggcttggatttgacaaatcttcactgagctaatggctgattggatttacttggcctgaatggaaaataaaaatcacctctgagca

SEQ ID NO: 1040386 - DNA, 120 bp, Artificial Sequence
  ENSG00000267480_0 (sequence is synthesized)
tttaaaaaatccaaactatttattgaaaagctctactaaacaaaattagttcagacaaagcaataagatgacgaatcaagctctctccagagatgaaagaaaagccagtctcaaagatga

SEQ ID NO: 1040387 - DNA, 120 bp, Artificial Sequence
  ENSG00000267480_1 (sequence is synthesized)
ctataactaacgctgttgctggaaagacaagggcaccgagccagccctgggagaggctccacttcttcaaagacaaaacgattccaaacgtggcaggacacagtgctcaccctacagtga

SEQ ID NO: 1040388 - DNA, 120 bp, Artificial Sequence
  ENSG00000256226_0 (sequence is synthesized)
agattactgaatgagtctggctctttaaattacgcttagtgaactcaatgattgctgaggacagcaactaggactggaagaaattgtctgctaagtggtagaaaaaccctctcatggtcc

SEQ ID NO: 1040389 - DNA, 120 bp, Artificial Sequence
  ENSG00000256226_1 (sequence is synthesized)
aatacatctgaggcctaccaacctaatgtatgcaggctacatggactgcttcctagatgtaaacagttctgggatatgtatacctataggaagacaggagtgagcaacagctactcatag

SEQ ID NO: 1040390 - DNA, 120 bp, Artificial Sequence
  ENSG00000256226_2 (sequence is synthesized)
actcctcctcatcttccaatgtgcactggagactcaaaccacaccatgaccccgttagcagcatagggaggttccagaatggtcctcttcagtgataacgagggaatacatctgagattg

SEQ ID NO: 1040391 - DNA, 120 bp, Artificial Sequence
  ENSG00000256226_3 (sequence is synthesized)
agttgggaagaaagagtaaactgatcatcataaagttctgctgtctagttctgctgacttcatcaacattatggcatcttttccagaatgctagcctatccttcacatgttcttgctcag

SEQ ID NO: 1040392 - DNA, 120 bp, Artificial Sequence
  ENSG00000256226_4 (sequence is synthesized)
aacatggctggtatctcatagtgccagtcatcattcataattacaaagaaaggttaaatttaccttagtgtcgccagatgttatgcacattatatttccaaatataattttaaaaaattt

SEQ ID NO: 1040393 - DNA, 120 bp, Artificial Sequence
  ENSG00000276842_0 (sequence is synthesized)
agaggcaatagtcactcttcgtagagaagatggctaccagaaggaggaaaatgtacatttagaaaactctcaataatttatcattatatgcaacaccaataaatatccttgtacatgcat

SEQ ID NO: 1040394 - DNA, 120 bp, Artificial Sequence
  ENSG00000276842_1 (sequence is synthesized)
atccgtgtacttgaccacagctgagttaaacagacatatcttaaaggatcctcttgtggccaaattgtcttccagaaatattttaccaatttatattccacctaactcaatgttggatta

SEQ ID NO: 1040395 - DNA, 120 bp, Artificial Sequence
  ENSG00000276842_2 (sequence is synthesized)
ttataatttatgccaatctaacaaatatacaatttgtttaggtttgtaattatttgtcttctagaaacattgaacatttctttttatgttaaataatcatgtatttatcttctctgagaa

SEQ ID NO: 1040396 - DNA, 120 bp, Artificial Sequence
  ENSG00000276842_3 (sequence is synthesized)
ttaattttgtttatattgaattttgtctaaattgaattttcatatttctggcagaaattttttgttgttaatccagccaaatctattcttctcttttgctaccattgcttctgtgcttag

SEQ ID NO: 1040397 - DNA, 120 bp, Artificial Sequence
  ENSG00000276842_4 (sequence is synthesized)
aaagatttctcccaactcaggaggagataaatatgcacctacatgtatagcttttttgttcatggtttcatttttttccatttaacacatttaaggattttcatgatgttttaatgaatg

SEQ ID NO: 1040398 - DNA, 120 bp, Artificial Sequence
  ENSG00000276842_5 (sequence is synthesized)
aaagtgtttcttgagatttgtacagaaaagcattatatagtattatgtggttcttaaggtttaaataagtacatcaggataaatttttaaaatatgtaataaataaactaatttaagggg

SEQ ID NO: 1040399 - DNA, 120 bp, Artificial Sequence
  ENSG00000276846_0 (sequence is synthesized)
tgactcagcaaactcctcttttgtgtggttatctgggactcctttgggagggaacattttaaattttccatttcaaagggttccattggcactcttgcactgttattctctgcctaccct

SEQ ID NO: 1040400 - DNA, 120 bp, Artificial Sequence
  ENSG00000276846_1 (sequence is synthesized)
gagacttgagttctcctggactcgaatctccagccacagagtccagaagcccatacctccacattctgtgactgttcccaaacacagggagaatttgcagaaaatatgtataaaaacctt

SEQ ID NO: 1040401 - DNA, 120 bp, Artificial Sequence
  ENSG00000276846_2 (sequence is synthesized)
gccattcttcgcaataaaaccccacattacaaactggtgaaaacggaggattttagcttgaacaggtttttcctctatttgaaatcaatcatttcccttttacaattttggagtgaagtt

SEQ ID NO: 1040402 - DNA, 120 bp, Artificial Sequence
  ENSG00000276846_3 (sequence is synthesized)
ccttatgtaaagtgccccctctgcacatgcaacatttaataaaccttgaaaatatgatgctaagtgaaagaagccagtcacaaaagaccacatgttgtgtaattccatttaaataaaata

SEQ ID NO: 1040403 - DNA, 120 bp, Artificial Sequence
  ENSG00000276846_4 (sequence is synthesized)
tccaaaatagaccaatacatagaaacagaaagtagattagtggtggcccggggttaggggagttggggggaactggagggatatggggtttacttcaaggtaatgaaaatgatctaaaac

SEQ ID NO: 1040404 - DNA, 120 bp, Artificial Sequence
  ENSG00000276846_5 (sequence is synthesized)
ttactgtggtgctgtttgcacaactgtgcaaatatactgaaaaccgttgaattttacactttcaatgggtggcttctgtgatatgttattaatatttctcaataaaacttcaaaaaaaaa

SEQ ID NO: 1040405 - DNA, 120 bp, Artificial Sequence
  ENSG00000287825_0 (sequence is synthesized)
gacaacagctagcctcccgcccgccctcctctcgcagccgcagcccgccttcaaagcggaccaaggcccgcggacggcgcagccaataggctttctggggtttgctctctagctaatggg

SEQ ID NO: 1040406 - DNA, 120 bp, Artificial Sequence
  ENSG00000287825_1 (sequence is synthesized)
aagactatctttttacgcccttggccagtaagagagcagatggtggcctcagcgacctatggcaaagtcctttcccaccccctaacggaggctctgggagagagaggatgcaggaccaag

SEQ ID NO: 1040407 - DNA, 120 bp, Artificial Sequence
  ENSG00000287825_2 (sequence is synthesized)
ggacggattcaggcgcgcagcaacaacagggtgcctggcacaaggagatactcagtaaaactctcatctgctgtgtcattaaggggaacacttaatggctcacgcctgtaatcccagcac

SEQ ID NO: 1040408 - DNA, 86 bp, Artificial Sequence
  ENSG00000287825_3 (sequence is synthesized)
gattgagaccctgtctcaacaaagaagaagaagaagaaaaaggccaggcgccgtggctaatgtctgtaatcccagcactttgggag

SEQ ID NO: 1040409 - DNA, 76 bp, Artificial Sequence
  ENSG00000287825_4 (sequence is synthesized)
tttgggaggccaagaagggagcgagacaccccccccatctcaaaaataaataaatcaaaataaaaaataaagagga

SEQ ID NO: 1040410 - DNA, 120 bp, Artificial Sequence
  ENSG00000230148_0 (sequence is synthesized)
gttagcggccaggcctgaaccccagtgggatattctacttccccatcccaggaatggagggggactccagcgaaattacagggaattcgtggtcacgggaccggcctccgccaatcgctc

SEQ ID NO: 1040411 - DNA, 120 bp, Artificial Sequence
  ENSG00000230148_1 (sequence is synthesized)
gtctgggcctggtggaaaacagagagcattatttggtttaattgattcaaaaacaccagaggaccacgaccaggacaccatgagcccccattcctacaccagtgcctcacatgctctctc

SEQ ID NO: 1040412 - DNA, 120 bp, Artificial Sequence
  ENSG00000230148_2 (sequence is synthesized)
cccaatgcctccgtttctccagaaaagctagaggaaccttttcctcatccccttcgaaggaaaagatgagtgaggatctccgcgttggaggaagagggagtcgaaagaggcttccactct

SEQ ID NO: 1040413 - DNA, 120 bp, Artificial Sequence
  ENSG00000230148_3 (sequence is synthesized)
gtggaagaaaccgataattgaggaaaaaaaaaaatcaagatttggggggaattacctacaaagatgtaaggtgtgttaatttgggcgcttcttggattctaccctgaggaggaggcgcgt

SEQ ID NO: 1040414 - DNA, 120 bp, Artificial Sequence
  ENSG00000230148_4 (sequence is synthesized)
gaggaggcgcgtggtgagaggagagctccaccagctgcgcgctcgtgtacgccgtccgcgcccgcttggacgccgccgaccccggggggctcttgtcccctcccccgccgccgccgccac

SEQ ID NO: 1040415 - DNA, 120 bp, Artificial Sequence
  ENSG00000230148_5 (sequence is synthesized)
caccactgcctccgccgccgccgccaccgccgccgccaccacagccctctgctggatccgagggggaggggtgggaaggggagaaaatgaaataaaagataattactgaacacgccgaaa

SEQ ID NO: 1040416 - DNA, 120 bp, Artificial Sequence
  ENSG00000230148_6 (sequence is synthesized)
catgcgccggttctgaaaccagactttgacctgcctttcggtgaggtccagcaaggccgcgatctcgacgcggcgtggccggcacaggaaaagatgagtgaggatctccgcgttggagga

SEQ ID NO: 1040417 - DNA, 120 bp, Artificial Sequence
  ENSG00000230148_7 (sequence is synthesized)
agagggagtcgaaagaggcttccactctttgaaaaaggtcagtattaaggtgaaaataagaaagagatttacaatcatcacaccactatccctgttaccctccaaaaacaacagttaaat

SEQ ID NO: 1040418 - DNA, 120 bp, Artificial Sequence
  ENSG00000230148_8 (sequence is synthesized)
ccatcgctgtatggtctgggttctcttctctgcccagtgtttgcagcactgcctctgccccttatgtacccctgctttcctcactttcaggcttccatgcttctctgtgacatcccccaa

SEQ ID NO: 1040419 - DNA, 120 bp, Artificial Sequence
  ENSG00000230148_9 (sequence is synthesized)
aaacaggcagagtctaagatgtgcatgtacccactcaagcctcaagcttgtatctgtatccatatccagggacatgaacaagaactgaggtagccattggtttaacttagagcactctca

SEQ ID NO: 1040420 - DNA, 120 bp, Artificial Sequence
  ENSG00000230148_10 (sequence is synthesized)
aagttcagatcagcgttatgtgtgtgcatgagtgtggtggggagattttcccctaggacaaagagactttccctcccatttttgccattgtgctagttaaaaaagaaaaaagaaaaaaaa

SEQ ID NO: 1040421 - DNA, 120 bp, Artificial Sequence
  ENSG00000230148_11 (sequence is synthesized)
ctgagcccggagctggaactagaaactttctgtcagtgtaacatctgcacccaatggtggttgggcttcgggtcacgtgacaccttctttgtggctccggaagaggattgtgaagtttag

SEQ ID NO: 1040422 - DNA, 120 bp, Artificial Sequence
  ENSG00000179066_0 (sequence is synthesized)
gggtgcagctctgcgtccccgcggccgccctgcctgctccgagggctgcgccaacgataacgcgcacctgtgggcaggggccaggtgccggcacccgaaggagtgcggctcggcgcacgg

SEQ ID NO: 1040423 - DNA, 120 bp, Artificial Sequence
  ENSG00000179066_1 (sequence is synthesized)
cggcccctcctaccagagctggcctgtcctccccgcagcaattacgagctctgcggctcctcctgtcctagctcttgtgccgagcctgccctgcccgacagctgcctgacaccatgccag

SEQ ID NO: 1040424 - DNA, 120 bp, Artificial Sequence
  ENSG00000179066_2 (sequence is synthesized)
gatggctgccagtgtgacccaggctttgtgctcagtggcatggactgcgtgcccccaatccagtgcagctgctccatggggggcaggtaccaccacccggctggggaggccttctggact

SEQ ID NO: 1040425 - DNA, 120 bp, Artificial Sequence
  ENSG00000179066_3 (sequence is synthesized)
ggggagcgctgtgagcaattctgccactgccaggcctccacccacgccgtgtgctgctccccgtcctcctgtgggccggggcagagatgtgagaccctcaggggcatctttgggtgccac

SEQ ID NO: 1040426 - DNA, 120 bp, Artificial Sequence
  ENSG00000179066_4 (sequence is synthesized)
ccactctcccctggcatttatcaagcaaccatgcactcacacgtcgcctcctttgaccggaagagtgttgagtttccaggcacttgcgcttctgcttttaccaagtcctgtggctcctcc

SEQ ID NO: 1040427 - DNA, 120 bp, Artificial Sequence
  ENSG00000179066_5 (sequence is synthesized)
gccttttcaaggtggaaattgggaaggagaaacaagtccagcagtcccattgtgttcatttcaaagatgtaggttcatgggacccaggtttgtctgcagagagagccccgacctgatgag

SEQ ID NO: 1040428 - DNA, 120 bp, Artificial Sequence
  ENSG00000179066_6 (sequence is synthesized)
gtaagcactcattggcatctagagactcttgaaccgattgaagctaaaagaaatacattggctcaaactaagtaaaaatcatgtgatagcctagtgaaagtgtagagattctgggtccac

SEQ ID NO: 1040429 - DNA, 120 bp, Artificial Sequence
  ENSG00000179066_7 (sequence is synthesized)
agaagttccctatataccactttggctgttttggttacagaaagcctcataaaaggtaactcaaaccagtcacagactgtgttttatgatttttagactaattacataactgaaaattcc

SEQ ID NO: 1040430 - DNA, 120 bp, Artificial Sequence
  ENSG00000179066_8 (sequence is synthesized)
agagggagatcaggcatggtttgatcagggtgctaactcagtttttcagcatttctcttggtctgtgtttctctatagcattagctttgtcctcaggctggcttttcttgtgatggcaaa

SEQ ID NO: 1040431 - DNA, 120 bp, Artificial Sequence
  ENSG00000179066_9 (sequence is synthesized)
ataactgccaattttccagtcattaaatgtgtattccccattgtccaaaacccgaatcttttcttaccccaagtactcaacaaaaattccaatgcttcactttgattaaaccccactgag

SEQ ID NO: 1040432 - DNA, 120 bp, Artificial Sequence
  ENSG00000179066_10 (sequence is synthesized)
ctccaggccttcttcacgcccttggccatcacagtccaggtggcacccggcctctccatgacctttcacgaatcccatgccctctgagtggcagtgcctgagacctacaccaacaccctc

SEQ ID NO: 1040433 - DNA, 120 bp, Artificial Sequence
  ENSG00000179066_11 (sequence is synthesized)
tgtggcctgggcggggacttcagcgtggatacccaggatgacttcagcggctctgatagcacatggctctctgatgccaacagcttaatgggggcccagcccctctgtgcccaccagaca

SEQ ID NO: 1040434 - DNA, 120 bp, Artificial Sequence
  ENSG00000179066_12 (sequence is synthesized)
aggcagccctataccaggccttctgtggcttgctgggcacccaagatgggccctacagggcctgcagtaaggacgtggatccccaggtgcatgtggagaactgcatccatgacctctgtg

SEQ ID NO: 1040435 - DNA, 120 bp, Artificial Sequence
  ENSG00000179066_13 (sequence is synthesized)
taagtgggtattcccagggagggtctttctcagcctgacctccccagctggcccaataccacttccaggatgtcctcctaggtcaacaccacccaaagtgacccactgcatgcctttctg

SEQ ID NO: 1040436 - DNA, 120 bp, Artificial Sequence
  ENSG00000179066_14 (sequence is synthesized)
gctaactgttcccgcgaagaacctacctgcttaaaactctgcaataacaataacagatgacactgagtgctattgcatcagtcaggatggtctgggttatgctgaagtaacgaactaacc

SEQ ID NO: 1040437 - DNA, 120 bp, Artificial Sequence
  ENSG00000179066_15 (sequence is synthesized)
tgaacatgacccagcatgaccaaggttgtttcttcatcactatcttcgtcacctttgtcatcatcacagtcactatcatcattaccgtcaccatcaccaccaccaccagcgtcaccatca

SEQ ID NO: 1040438 - DNA, 120 bp, Artificial Sequence
  ENSG00000179066_16 (sequence is synthesized)
ccaccaccaccagcctcaccaccaccaccaccaccagcattaccatcatcaccaccaccaccatcaccacaagcattaccatcatcactaccaccaccatcattgttaccacaaccacaa

SEQ ID NO: 1040439 - DNA, 120 bp, Artificial Sequence
  ENSG00000179066_17 (sequence is synthesized)
ccatcaccaccatcaccatcatcattgttaccacagccacagccatcatcaccactaccatcaccaccatcatcaccatcaccaccatcaccatcatcatcaccaccaccaccaccatca

SEQ ID NO: 1040440 - DNA, 120 bp, Artificial Sequence
  ENSG00000179066_18 (sequence is synthesized)
acatcatcatcaccatcataaccatcaccaccagcatcaccatcaccaccagcatcagcatcaccatcactactataatcaccatcaccattatcactaccaccaccatcattgttacca

SEQ ID NO: 1040441 - DNA, 120 bp, Artificial Sequence
  ENSG00000179066_19 (sequence is synthesized)
ccgccgtgaccacgccgccaccgttatcaccgccgtgaccacgccgccaccgttatcaccgccgtgaccacgccgccaccgttatcaccgccgtgaccacgccgccaccattatgctaca

SEQ ID NO: 1040442 - DNA, 120 bp, Artificial Sequence
  ENSG00000179066_20 (sequence is synthesized)
tcctgatgatgcctccacctcccctcctttgcctttatgacttacccttggcccccacaaccctctctccgctcccttggtcctattctggttggaaatgctccagaatagtaatgcttg

SEQ ID NO: 1040443 - DNA, 120 bp, Artificial Sequence
  ENSG00000179066_21 (sequence is synthesized)
tgcccaggaagtgggaccttggcgtatcgctgtgaccacacctcccagccggtcagcctggccgctcaggctctacctgcaaaggcaaggccccacccaaccagcacccctctcatggct

SEQ ID NO: 1040444 - DNA, 120 bp, Artificial Sequence
  ENSG00000179066_22 (sequence is synthesized)
gggggtgcctccaggctgccctctctagggccaggagcctgcagaaacgctcccagccttgaataaagagcaacgaaattattgaaacaaaatcaataaaagtttgaatcagggatggta

SEQ ID NO: 1040445 - DNA, 120 bp, Artificial Sequence
  ENSG00000276593_0 (sequence is synthesized)
caaaaatatacttttaagatagctcacatttcatcaagttaacgtgtgctttccattatctgaaaaatctcattaacagataattttatgacattgacacccaatttttgaagttgaagg

SEQ ID NO: 1040446 - DNA, 120 bp, Artificial Sequence
  ENSG00000276593_1 (sequence is synthesized)
aaaataagggtttttttttttttttgtaaaatctcataaataatagaacaaactttcttgcagtataggctttcctattcacttcgcccagagtattttagaaggactgagggaaaaaag

SEQ ID NO: 1040447 - DNA, 120 bp, Artificial Sequence
  ENSG00000276593_2 (sequence is synthesized)
atttgtatttcagctaatttatccttttaaaaatgtgattgcattactaggttcttaccatatgttaattaagtagtcaatgacttgaaatgaaaaatacaattgatagttactttagta

SEQ ID NO: 1040448 - DNA, 120 bp, Artificial Sequence
  ENSG00000276593_3 (sequence is synthesized)
ataacttacaagttgttattcacatattggttaatgggaaaaatgtgtgttcatgtgatgaagattattggaaatcattatataaataatggtaaaaagaatacagagctggtgacactt

SEQ ID NO: 1040449 - DNA, 120 bp, Artificial Sequence
  ENSG00000230142_0 (sequence is synthesized)
gagagggagccagggctgctaacacattgtcacctctcactgggattacagtgaagttctgcaacaacagaaaatgtgtgacaaaaatgccagaattattatagtctccctttagttcct

SEQ ID NO: 1040450 - DNA, 120 bp, Artificial Sequence
  ENSG00000230142_1 (sequence is synthesized)
aagaaaagaaaattaatctgctactcttagaagagttccagggctatgaataactattctatgaaaaaataatatcacagtgaatttacttcatttccctaaaacatctaagtatatagt

SEQ ID NO: 1040451 - DNA, 120 bp, Artificial Sequence
  ENSG00000230142_2 (sequence is synthesized)
aaaaagagagagtattccctccagacaaaggctttcaagcaaccacaggagaaaatgccctgtgtagggataatgaatattaatctaaaataattttttctaatatatggtttaattcca

SEQ ID NO: 1040452 - DNA, 120 bp, Artificial Sequence
  ENSG00000253765_0 (sequence is synthesized)
acttcacactccactcttccttggagagccatcctccatttcctgcaggtctggtcagagcccctttcatagaaatggaaacacttacttgaattggtttctgcagaagccaggccaacc

SEQ ID NO: 1040453 - DNA, 120 bp, Artificial Sequence
  ENSG00000253765_1 (sequence is synthesized)
gtttctaacaggaagtctggggtctcaggcaggttcagcagcagtggttcagggacagatttcatattgaaaatcagcagggtagaggctgaggacgttggggtttattactgcctgcaa

SEQ ID NO: 1040454 - DNA, 120 bp, Artificial Sequence
  ENSG00000229938_0 (sequence is synthesized)
gcaattctgaatcatcagctcatgtcatttctaaagccaagtccccatcctttgactcatcaattatcatatatttttactcatagatattctccctatcactttttaaagatgcaattt

SEQ ID NO: 1040455 - DNA, 120 bp, Artificial Sequence
  ENSG00000229938_1 (sequence is synthesized)
tggtggttttacagcaagaaacttccaaataatttctggtgtcatggactgcgtggtttcccattgttgctctaatctgcccttctcacttcaaacctctacttcctaaaatgagtcaag

SEQ ID NO: 1040456 - DNA, 120 bp, Artificial Sequence
  ENSG00000229938_2 (sequence is synthesized)
gatggactctgatgttgttgaaggtgagaagcagggcaaagagaaacagaaaaaaaggggagctgactgagacgtgaacgagctggggaagtccaggttgaacatgcacttatgagagac

SEQ ID NO: 1040457 - DNA, 120 bp, Artificial Sequence
  ENSG00000253766_0 (sequence is synthesized)
caatgattgagtcagtcatgtgtatgtaataaggcctccataaaaaccgaagaggatggggtttgcagagcttctaggctggtgagcacttggatgtgctggaggcatccagagggtgga

SEQ ID NO: 1040458 - DNA, 120 bp, Artificial Sequence
  ENSG00000253766_1 (sequence is synthesized)
gcacgtggagagggcatgaatgctcagtgcaccttccctcataccttgccttatacagcgtttccatctggctgctgttgagttttattctttataacaatatgctaaccctaagcaaag

SEQ ID NO: 1040459 - DNA, 120 bp, Artificial Sequence
  ENSG00000253766_2 (sequence is synthesized)
ttttcctgagttctgtgagccattctagcaaatggtggaacctgagaaaggggacatgggaatctctgacttacagccagtcagcccgaagcacaggataccaaaatcatcataccagag

SEQ ID NO: 1040460 - DNA, 120 bp, Artificial Sequence
  ENSG00000253766_3 (sequence is synthesized)
ctcatttggcatcccaggaggcctggatcagtttcactgtgaatgctccgccgctcaaccacacaagcacccttcctccaggcccaggggatactgcagaagaggctgaaggttgcacta

SEQ ID NO: 1040461 - DNA, 120 bp, Artificial Sequence
  ENSG00000253766_4 (sequence is synthesized)
cttccctacttttgaggttttgggactccgactggcttcctggctcctcaccttgcagatggtctattgtgggacctcatcttgtgatcatgtctcagtatgttgctcagactggtcttg

SEQ ID NO: 1040462 - DNA, 120 bp, Artificial Sequence
  ENSG00000253766_5 (sequence is synthesized)
ctcagcctcttgagtagctgggactacagttgcaagccatcctgtctggctagttatctttaattaatgacatttgttaaagtaacacaaaaatcctagaaacatttgcctgttgaaact

SEQ ID NO: 1040463 - DNA, 120 bp, Artificial Sequence
  ENSG00000253766_6 (sequence is synthesized)
aaaaatcctagaaacatttgcctgttgaaactttctgataatttgaatgaagtaaagtttggagtctctgtctcattgaaaatactcaaggttaatataataaaaacagcaaagcagtaa

SEQ ID NO: 1040464 - DNA, 120 bp, Artificial Sequence
  ENSG00000231680_0 (sequence is synthesized)
ctcttgtcgccggtgcgttgtgcctgcatctttgctccagctaagccagctcctctaggcctctggctgcccaccgcagtgggctctggactggactctggaccatgcgttgctgggttt

SEQ ID NO: 1040465 - DNA, 120 bp, Artificial Sequence
  ENSG00000231680_1 (sequence is synthesized)
gctgctgtgatgatggaggtgctgcttttgtctgtctgatgtttatactttgtgggtgtggagtgtgctaggaacatctcatatgtgccaggaactggctctttggaaaagtcagtccag

SEQ ID NO: 1040466 - DNA, 61 bp, Artificial Sequence
  ENSG00000231680_2 (sequence is synthesized)
atatgtgccaggaactggctctttggaaaagtcagtccaggttagaaacatagactgtggc

SEQ ID NO: 1040467 - DNA, 61 bp, Artificial Sequence
  ENSG00000231680_3 (sequence is synthesized)
tccgggaggctgaggcacgggaattgcttgaaccctggagacagaggttgcagtgagccaa

SEQ ID NO: 1040468 - DNA, 120 bp, Artificial Sequence
  ENSG00000231680_4 (sequence is synthesized)
actgcactccaggactgtatcaagttcactccaaaagtggagaagagccatctggactgcaactgccaccaagggaagccacacttcagccaagtggggccctccacctaaggccgagca

SEQ ID NO: 1040469 - DNA, 120 bp, Artificial Sequence
  ENSG00000231680_5 (sequence is synthesized)
tgaaccgcatcacacggccacccccagttgcaacagagactgggaaggtggagtatcagatggaaatcctattgtcaggacccaggctgagcatgctgcctccccacacgaaaccagact

SEQ ID NO: 1040470 - DNA, 120 bp, Artificial Sequence
  ENSG00000231680_6 (sequence is synthesized)
tctgttagcaagaaagatacaagatcgccggccactatggttattgacatgttgtgctgtcatcttccaaaaactgacgagggccaggtgcggtggcacacacctgtaatcccaacatcc

SEQ ID NO: 1040471 - DNA, 82 bp, Artificial Sequence
  ENSG00000253763_0 (sequence is synthesized)
ggtgggatgcagctggtagagtctggagcaaacttgacaaagcctgggtgtcccagagactctcctgtgcagcctctggatt

SEQ ID NO: 1040472 - DNA, 120 bp, Artificial Sequence
  ENSG00000253763_1 (sequence is synthesized)
atgtactacgcagactctgtgaagggccgattcaccatttccagagacaatacgaaaaactcactgtatctgcaaatgaacagactgagggcagaggatgcagctgcatatgactctgtg

SEQ ID NO: 1040473 - DNA, 120 bp, Artificial Sequence
  ENSG00000253762_0 (sequence is synthesized)
acacaggcattaacatatacggtcattgtctctgctgcttcccactgcagctttatataataaaacaagccgcgtcaaataggctaggctgtaatattaggtaaaatctaatttcagttt

SEQ ID NO: 1040474 - DNA, 120 bp, Artificial Sequence
  ENSG00000253762_1 (sequence is synthesized)
ggttatcacatagcgttcatttccctaagggaggagaaaaaattaaatttgtaagcttaagattccagctgaagtactcaagaatcctgtttctctgacagaggaaaggaacaacaactt

SEQ ID NO: 1040475 - DNA, 120 bp, Artificial Sequence
  ENSG00000253762_2 (sequence is synthesized)
gactggacacatcctaacccaaccatacgctgtgttacttcctccactgcgccacacacagctattattctaagctctcttattcaaacccttaaggatttgtaaggagaacactaagaa

SEQ ID NO: 1040476 - DNA, 120 bp, Artificial Sequence
  ENSG00000253762_3 (sequence is synthesized)
gatgggcagaaatcaaagcttcctggtgtgaggttgtggtagaagattcctggttgatcaatgtatagaagatggaaatggattccagttgtgggaaggaagaaatcattgctgcagtct

SEQ ID NO: 1040477 - DNA, 120 bp, Artificial Sequence
  ENSG00000253762_4 (sequence is synthesized)
cagtctgctctgcaggaatagaccatctgaggacacagcacgaaggtggccatctgcaattcaaggagagaagcctcgggagaaaataaacctgccggcaccttgatcttggacttttag

SEQ ID NO: 1040478 - DNA, 120 bp, Artificial Sequence
  ENSG00000253762_5 (sequence is synthesized)
tttccagagctgtgagaaaataaatgtttgttgtttaagccacccagtccgtggtattttgttatggcaaacctagcagactaatacagagaaggatgaaaaatgaagaacatttttttt

SEQ ID NO: 1040479 - DNA, 120 bp, Artificial Sequence
  ENSG00000253762_6 (sequence is synthesized)
ttggagcctattacaacagatgaaaattcatgccctcttacaccctaagtttcagagtagggaaataaatactacatgtaatgaagacagcaaattatacaatatatgagaaggtaataa

SEQ ID NO: 1040480 - DNA, 120 bp, Artificial Sequence
  ENSG00000253762_7 (sequence is synthesized)
atgctgtggaagaaactcgaaggttatattgaactaggagatcagcagtgctggggacagagggttacaggttttggtaccagacaggaagagcagggaggcatcattgagaaggtacca

SEQ ID NO: 1040481 - DNA, 120 bp, Artificial Sequence
  ENSG00000253762_8 (sequence is synthesized)
actgtgtactcagaagagaggaggcagctggttatgaggtcatctgggggacagcacgacaggtagagacaggaaaagtataaaggctctgaggtggaacctgagggttggaggcacagc

SEQ ID NO: 1040482 - DNA, 120 bp, Artificial Sequence
  ENSG00000253762_9 (sequence is synthesized)
aggaagccaagatagctggcattcaccataagaatggtagaaaggagtctgaggcaagatacaggccagcctgcatggggccttgtagaccgagtaaatacctcggatgttgcaaggact

SEQ ID NO: 1040483 - DNA, 120 bp, Artificial Sequence
  ENSG00000253762_10 (sequence is synthesized)
tttctgccttgcacgttctcctttctcaaaatctgttccttctgtttgttctacaaattcctagtttctgaaaaccagctactgatctggtctaattttctctttttatcatagggtaaa

SEQ ID NO: 1040484 - DNA, 120 bp, Artificial Sequence
  ENSG00000253762_11 (sequence is synthesized)
tttgtttgtttgctttttactaacatcatcttctccctcaactacctaatctttggctttcctaaattgggaaaattaatatgacataagtttcttcatcagatatatcctcaaaatgat

SEQ ID NO: 1040485 - DNA, 120 bp, Artificial Sequence
  ENSG00000253762_12 (sequence is synthesized)
ggttaactgagccaaggtcatattggaaaagggtttgaaatgagaacatatggacacagcgaggggaacaacacacactgggacctgttgcagggttggggggcgaggggagggaactta

SEQ ID NO: 1040486 - DNA, 120 bp, Artificial Sequence
  ENSG00000253762_13 (sequence is synthesized)
gtcaataggtgcagcaaaccaccatccacacatatatctaggtaacaaacctgcacattctgtatgtaaagtaaaataaaaaaacacttccatatattactttaaaaatgttttttaaaa

SEQ ID NO: 1040487 - DNA, 120 bp, Artificial Sequence
  ENSG00000253762_14 (sequence is synthesized)
ttttaaaaaaagaaagaaaaagagttcgagacacgggaccattgcttaaggaagggtgcacaatggggttataaatcaacactcttaggctgatgtgttctgtgggagaggggctctgca

SEQ ID NO: 1040488 - DNA, 120 bp, Artificial Sequence
  ENSG00000253762_15 (sequence is synthesized)
gagggatctggcaggctgaaggagatccatggtattgttcaggagataaatgagggatagggtgacctgaaggagagaaagagaagccactgagggaacacatgtaaagacaacaacgtt

SEQ ID NO: 1040489 - DNA, 120 bp, Artificial Sequence
  ENSG00000253762_16 (sequence is synthesized)
taagtttagtgtttgttctatgaacaacagacacacccaaaaatgttatctcagcatatacattgtggtagtatcttactgtttatttgtataataccaaaaatctatgcagattataat

SEQ ID NO: 1040490 - DNA, 120 bp, Artificial Sequence
  ENSG00000253762_17 (sequence is synthesized)
tcttaataatgaatttcaccattgtgggaaacgagaaataaatataaaaagtaaaaatgccttaaatcaagtgattactttcatttccaattatgtatcctcacactgaaactctgggtt

SEQ ID NO: 1040491 - DNA, 120 bp, Artificial Sequence
  ENSG00000253762_18 (sequence is synthesized)
gggtgtcacggacctcgttctgcagaagcaagcgtatgtgaacaaggttattgatttaaacttgcacagacacaggaattgattcaatctgaaaacaaaaacgtgagctcatgtgtgtgt

SEQ ID NO: 1040492 - DNA, 120 bp, Artificial Sequence
  ENSG00000253762_19 (sequence is synthesized)
gtgtgtgtaaaatttcttcatgaaaatgaaagactatgccatcttcaagttggacaatacctaagggtcttcaactctaacctctttattgtgttaatatgaaacacagaggtagggtag

SEQ ID NO: 1040493 - DNA, 120 bp, Artificial Sequence
  ENSG00000253762_20 (sequence is synthesized)
gagagtggcttatccttgggagtcccaggagtcaggtctcatgacctcatccaatgctgttttgaaggtatctctagctggttttacagctagagagcctgggttcaaatatcagcacca

SEQ ID NO: 1040494 - DNA, 120 bp, Artificial Sequence
  ENSG00000253762_21 (sequence is synthesized)
ctacttacttgctgtgaccttgggcaagctaccatatctctctatgtgttaggtttctcatctgtaaaatacaaataacaataatacttatttgtggttgattgtctaatgagcacaaag

SEQ ID NO: 1040495 - DNA, 120 bp, Artificial Sequence
  ENSG00000253762_22 (sequence is synthesized)
tctgccatgccactatatactcatctgtgtaatgtgactttgctaatcctcttgaccaagggggtaatctcttcgaatctgggttaaccctgtgacttgttttgacaaataaaatgcaca

SEQ ID NO: 1040496 - DNA, 120 bp, Artificial Sequence
  ENSG00000253762_23 (sequence is synthesized)
atcacgttcttgttctccctgactctcgtctgggaaaaggcaatggttccttctggctcctttgcacatctagtatttattttaccctcagctcgtagatttcagatgtactgggcctga

SEQ ID NO: 1040497 - DNA, 120 bp, Artificial Sequence
  ENSG00000253762_24 (sequence is synthesized)
ggaagagagttcctaccacagaaagaaaggcagccaagaacacaatgtcccgacctagctcttggaagtactaaatttcatcacggaaaccacagcctcaaggacagaggacttatccag

SEQ ID NO: 1040498 - DNA, 120 bp, Artificial Sequence
  ENSG00000253762_25 (sequence is synthesized)
agtcatcaaatctatcgctttttctgctttctgttttctctgaaagagccgtgaatgatgagacgacaaaatattggattatttgtgctcttgaaacagatgccacctgagttgtgacag

SEQ ID NO: 1040499 - DNA, 120 bp, Artificial Sequence
  ENSG00000229931_0 (sequence is synthesized)
ggtaatttgagcggtgacgggtcggtcctcgcgcgcctccctgggtccctgcacctagttggaggggactgaacgacaacggggcgctactcaggcaacctgggggactcccccaagggc

SEQ ID NO: 1040500 - DNA, 120 bp, Artificial Sequence
  ENSG00000229931_1 (sequence is synthesized)
tgtcaggcttcagctgggagccgatgcaacaccccagcggggaggggaggtcggcccattctaatcccgacgtgtccttggtcccaggcgctcggagcagcatctgagagggctcactct

SEQ ID NO: 1040501 - DNA, 120 bp, Artificial Sequence
  ENSG00000229931_2 (sequence is synthesized)
cgcttcggcgttccggaacccaggcctgggggccgcggggattgcctctgcgtgcaactccggaaagtttcaaggggtcccccgactgcacaggtccggaaatcggctttgatatggaac

SEQ ID NO: 1040502 - DNA, 120 bp, Artificial Sequence
  ENSG00000229931_3 (sequence is synthesized)
tactccgctctagcctggaaaggagacccgcgcactcctctcgcagctaatttcggatcattaatttaatcggaaatgaggtaaccagtgtaggagacagagaaagcaaccggagcatca

SEQ ID NO: 1040503 - DNA, 120 bp, Artificial Sequence
  ENSG00000229931_4 (sequence is synthesized)
aatggcagttctcgagaatcgacgaggaacttaaatctggactcagggtttcagtgcggtctccgactcccaccaccccgcccctccgcctgtctcgccgccaggtgtgacctccacgcg

SEQ ID NO: 1040504 - DNA, 120 bp, Artificial Sequence
  ENSG00000253768_0 (sequence is synthesized)
atatttccatcagatgtgtttctcaagcactctgccactcctttctacctctcctgcgtttgatctgaggacggcccgttccacaggaacacaaaggcacagaagatgaagtaacttgcc

SEQ ID NO: 1040505 - DNA, 120 bp, Artificial Sequence
  ENSG00000253768_1 (sequence is synthesized)
tccttgatggtgtggagtccgcggtccgcattggttaacttaactgtgcttcctcagatccagtctggaattaattattgaattgtatgcattttcaatgccatcctcaagctaacagcc

SEQ ID NO: 1040506 - DNA, 120 bp, Artificial Sequence
  ENSG00000253768_2 (sequence is synthesized)
aactatgcgggggaataaaacggagcagagaaccgagttgggttccagagaccccagattgtcttcatttgcagttgccaggttccctgcagcccgggtctgtggatttcccgcggctca

SEQ ID NO: 1040507 - DNA, 120 bp, Artificial Sequence
  ENSG00000285254_0 (sequence is synthesized)
ctttctcgggctgaacgcggctgggctcccccaaggcctccccttgctgacggctccacgcctgctggacgagaagcggcctccccggggcgtcgcaagcccctgggacaagaagaggag

SEQ ID NO: 1040508 - DNA, 120 bp, Artificial Sequence
  ENSG00000285254_1 (sequence is synthesized)
ccgacattgagggagacctgagcagtggacgcaggcagcgtcagcctgggcgtccccggagtcgcggcgagaccctggctccccaccaccgcccggctctcagctttggcatcgcgtctc

SEQ ID NO: 1040509 - DNA, 120 bp, Artificial Sequence
  ENSG00000285254_2 (sequence is synthesized)
cagagagggcggtggatgacgaggaactgcagcagtgtacgacccccgggctccagacgaccctggggagagcgcgcagagttcctggctagcggccccctcgcagccgggcaccccttc

SEQ ID NO: 1040510 - DNA, 120 bp, Artificial Sequence
  ENSG00000285254_3 (sequence is synthesized)
tcggctgcgcgcagccacttaggggcacaagataagcccctggggagggagcgggctgcaggcgcggtggggaagaacggcccggacgcagccgggcacagggaaggccgggcctgcaga

SEQ ID NO: 1040511 - DNA, 120 bp, Artificial Sequence
  ENSG00000285254_4 (sequence is synthesized)
ctggagagacgtgggctgcggtgaaaccgttagggctgctttgccgcgcacagacgcggaggcctttacaaggccggcaggcctcgcccagggcctgggccgccgcaggtgcctttgggt

SEQ ID NO: 1040512 - DNA, 120 bp, Artificial Sequence
  ENSG00000285254_5 (sequence is synthesized)
cacacccggggcgaatcccaccccctcctggggccgcttctgtttaccaaacccctcaggctattgcgttagttgtgcgggggaaggatagaggcagggtcctctggtggaggggaggga

SEQ ID NO: 1040513 - DNA, 120 bp, Artificial Sequence
  ENSG00000285254_6 (sequence is synthesized)
actggggacccggggctgctggggacgcaggcgacagaatgaaaggcgaagaggcggcagctcgaatctgtctgggggtgattttaaccggcgcagaggtgcagcatatgctttccaggt

SEQ ID NO: 1040514 - DNA, 120 bp, Artificial Sequence
  ENSG00000285254_7 (sequence is synthesized)
tggactgcggaatacaaagaacgactctgagcccggggagcctcctgacaccgaaaccaaacgatcccgacctaggggggctgagtggcaggagactggattttttgttgagttgcaatt

SEQ ID NO: 1040515 - DNA, 120 bp, Artificial Sequence
  ENSG00000285254_8 (sequence is synthesized)
aaagggagataattaagcccggagccgcgcagcttattaatatttatagcccggagcgacagggcctgcgctcgctggaagcggatttgcaggcccaggcgcggagccggtgtctcctga

SEQ ID NO: 1040516 - DNA, 120 bp, Artificial Sequence
  ENSG00000285254_9 (sequence is synthesized)
gccaggggcttcgcagactcgggaggagaaggctcgatggggaaattggggagcgtccgccttctgcgtttctcctaattacgccagcggtcaaagtccggccgggccggaacgtcccga

SEQ ID NO: 1040517 - DNA, 120 bp, Artificial Sequence
  ENSG00000285254_10 (sequence is synthesized)
agcatttcggaagcccagttaggtctcgtctctttgttaattacccaaactgcatctcgcagtatgtttctgcccacggggacagaccgcgcgttaaggaaatggcccaataattaggac

SEQ ID NO: 1040518 - DNA, 120 bp, Artificial Sequence
  ENSG00000285254_11 (sequence is synthesized)
tcggggtagaatgtgtcttattttcttggagcatgtggggcaaaggagacagtaggtacatgcggccctggctttggggcaattttgcaaaaaagaaaacgccctccggcctcgaatttc

SEQ ID NO: 1040519 - DNA, 120 bp, Artificial Sequence
  ENSG00000285254_12 (sequence is synthesized)
tttcgtccgcggtcggccaggcgccgcgctttggttcctttcccactccgcggtccccgggtgtgggccaaagcccggaccggcgggaggggctcccggtgcccgcgtcgctggcccggc

SEQ ID NO: 1040520 - DNA, 120 bp, Artificial Sequence
  ENSG00000285254_13 (sequence is synthesized)
gggatgcgcccgagcgggctggaaggaggggctgcacaggcggcgcccacagggtcgtagcgcccgggctgggagcctgagagcggtaggttcccggcctgcggccgcgcgctcaactcc

SEQ ID NO: 1040521 - DNA, 120 bp, Artificial Sequence
  ENSG00000285254_14 (sequence is synthesized)
cggaaaatgcgcgcgaagcttttgccgtttgtaccgcacgcggttctcggatctctgcttttcgcgcacggccggtgggggcggggaggaagcgcgggtgggagtgggcggccgcggtta

SEQ ID NO: 1040522 - DNA, 120 bp, Artificial Sequence
  ENSG00000285254_15 (sequence is synthesized)
gcttctcctgtccgaacgcagggtttcactggggcgccgctacggttcctatggcaacgcggctcctcgacgcagcccaggagtcgcggtcgcgggaggctgcgccgcgcaccgagctct

SEQ ID NO: 1040523 - DNA, 120 bp, Artificial Sequence
  ENSG00000285254_16 (sequence is synthesized)
tccctgtggccgccgcagccgccagcctcttcctgctcatgcttttcctcatcttcatctcggtctgagtgggctctggacctctccaccagcctctgccccagaactgttaactgcggg

SEQ ID NO: 1040524 - DNA, 120 bp, Artificial Sequence
  ENSG00000285254_17 (sequence is synthesized)
ggggaaaaaaggaatttgtcgtcgcaacgcgcgttccgatggagccgcacgccacaaaggaagactcatgctgcaccccgcggggcagatgcggcgacactggacatcgctgcacagctg

SEQ ID NO: 1040525 - DNA, 120 bp, Artificial Sequence
  ENSG00000285254_18 (sequence is synthesized)
ggtctgcccgtttccagagctgcttagcgccgacgcccataaatgaggaggactccctgtgtattaaaagggggatccgcagggtttaatttgataaggattatagccttcataaaggca

SEQ ID NO: 1040526 - DNA, 120 bp, Artificial Sequence
  ENSG00000285254_19 (sequence is synthesized)
tttttaacaaaaagatgtaggtggcatggtaatcgagtattatttacgcatctctccgcacacgcactcatacctgaaaacgttttggcaggcacaaaatgatttttttgtgtataaaga

SEQ ID NO: 1040527 - DNA, 120 bp, Artificial Sequence
  ENSG00000285254_20 (sequence is synthesized)
atgtgtgtaactcgtggatggtggggttcagcaggacagattagtgacattagataatttacaacgaggattatgtttgtgctgaaaataaaagctatattgtttatttagttcattgcc

SEQ ID NO: 1040528 - DNA, 120 bp, Artificial Sequence
  ENSG00000198054_0 (sequence is synthesized)
accccaccctaatcttgttatgcaaataggcttcccacttggcaggggccgtcttgtccactcgtttctgtaaacatgggtggcaaaaagagaagatggagctgccatttagaacatgcc

SEQ ID NO: 1040529 - DNA, 120 bp, Artificial Sequence
  ENSG00000198054_1 (sequence is synthesized)
taatcccagcttcatcttgctgagcaaaaatgaaggagcctggacccaactttgttactgtgagaaagggtcttcattcattcaagatggcatttgttaagcacctacttctctttctgt

SEQ ID NO: 1040530 - DNA, 120 bp, Artificial Sequence
  ENSG00000198054_2 (sequence is synthesized)
tgtctcagcctcctgagcagctaggattacagacaaaccttggaaatcaagaaagttctggaatgatgaagctgttcatgccaagaccgaaagtgctggcccagtatgagtccattcagt

SEQ ID NO: 1040531 - DNA, 120 bp, Artificial Sequence
  ENSG00000198054_3 (sequence is synthesized)
tcatgccgtgacaattttcttggaactcctttttattgttagttctcacttgtttccatatttagtgaatgtacatttaattgcaaagctgtcattaataaaaattcttatagtacctca

SEQ ID NO: 1040532 - DNA, 120 bp, Artificial Sequence
  ENSG00000198054_4 (sequence is synthesized)
tccttggaaagtcatcgtggaaaatgaaggctggctcatacattttcccagacaggaatttggctgccaacagggaattctaaacaactaaaaactccagatgatgaatgcacaacataa

SEQ ID NO: 1040533 - DNA, 120 bp, Artificial Sequence
  ENSG00000198054_5 (sequence is synthesized)
tgtcaaagacagttaacaaatcctcggaatattgcttcatgtacagttattggaggctggagtgcagtggttcaatcacggatcactgcagcctccacctcccagttcaagaaattctca

SEQ ID NO: 1040534 - DNA, 120 bp, Artificial Sequence
  ENSG00000182586_0 (sequence is synthesized)
agcaaaggacgggcaggtggggcagctgcacacccagggccctctccacggtcttcccgggcccacccctcccgcggtcctgggtcatccacctgctggcctcactctgcccacgcggcc

SEQ ID NO: 1040535 - DNA, 120 bp, Artificial Sequence
  ENSG00000182586_1 (sequence is synthesized)
aggtcccaccggcccctgagctcaacagaccaaagctggcccgaccccacccccaagaagaatgaaacaatttttttttacctcttgcagaaaagtaaaagatcatttattcattctgtt

SEQ ID NO: 1040536 - DNA, 120 bp, Artificial Sequence
  ENSG00000182586_2 (sequence is synthesized)
tctagatagcaaaactaagtgtcaaaagcaccttctgcacacagtctgcacacactggccggtggtcctgttcccgcaaggttgagctgtgttccagagacatgggtcctccgggtgatg

SEQ ID NO: 1040537 - DNA, 120 bp, Artificial Sequence
  ENSG00000182586_3 (sequence is synthesized)
aggagccgctggagggccctgagctgcacgtgctaatgattaacgccccgtccgtgctggccggtttctcaaatgcctcctgacgattgcgcacagccggacatcatttgtactgagaga

SEQ ID NO: 1040538 - DNA, 120 bp, Artificial Sequence
  ENSG00000182586_4 (sequence is synthesized)
caaaaggaaatcactgaggctttctgaggtgagctgggcggccgcggggggactggactcacacctgctaacggccagtccacaggacctgcccagaggctcggacacacagctgaagtc

SEQ ID NO: 1040539 - DNA, 120 bp, Artificial Sequence
  ENSG00000182586_5 (sequence is synthesized)
gccaatgaacggcctccagaaacaacctttgtggaaccccctataaaagccttcccagcgcttgccttcaggacactgctcagggctgactcagtgtacccaagctgcagtctttgtttc

SEQ ID NO: 1040540 - DNA, 120 bp, Artificial Sequence
  ENSG00000182586_6 (sequence is synthesized)
ccaaataagcagtcattcattctacctccgtgtcaatcttttcttcgtgaacacagctggtgtcaggagcagggcttagcaagatctctcctttgagcggctttctctggaatcgggtga

SEQ ID NO: 1040541 - DNA, 120 bp, Artificial Sequence
  ENSG00000182586_7 (sequence is synthesized)
agtccccacaacacagaggcccctgtgcgcgccccttctttggggccagcacctcccttcaactgaggctgatacctttatttgggaatctgggggcagttgctgcctctgtgccggcaa

SEQ ID NO: 1040542 - DNA, 120 bp, Artificial Sequence
  ENSG00000182586_8 (sequence is synthesized)
aggctttcagcttggaggacgttttccctgcttactggagattttcccaatggtgtccatgtcactgttcctctagcagatgtggaaagtggctgctcagtgaggactcagcccccacca

SEQ ID NO: 1040543 - DNA, 120 bp, Artificial Sequence
  ENSG00000182586_9 (sequence is synthesized)
acctgactgagggtcacacgacaccatggtggaaagtcacaaagggtaacgggccaagagggtgaggggggctccctgaccctgaggacccctgaggcactgctgcaccttccacggatt

SEQ ID NO: 1040544 - DNA, 120 bp, Artificial Sequence
  ENSG00000182586_10 (sequence is synthesized)
ctgtgtctagcgttgccctctttgcagatgcccctcgtggtggtggcacaaagacctaaaaatgatttctgtaaaatgggtacaaggagctccctgataaagcagctcatcctagacagc

SEQ ID NO: 1040545 - DNA, 120 bp, Artificial Sequence
  ENSG00000182586_11 (sequence is synthesized)
ggaagcggaaggcgtccatctttaccgtgttcagacccggatgagtcctagtccccgccacacacaggtcgtgggttctcctttgagagtgaccactggttcctagagcttttcctaaac

SEQ ID NO: 1040546 - DNA, 120 bp, Artificial Sequence
  ENSG00000182586_12 (sequence is synthesized)
ggggcggctgcagggtccgcaaagccggctgtttgcgaagggcgcagctccacctggaacagccgaggccgcccacgcgcttcccgcgggatcagagcagcctccacggctgttgtctca

SEQ ID NO: 1040547 - DNA, 120 bp, Artificial Sequence
  ENSG00000182586_13 (sequence is synthesized)
ggcaccacgggatgcctttcttcgtttcaatagctgtgggaaagcctcaatcggtcctgaaagaacccagatgtgcagcaatgacaaggccttctctgagactctagaaccttctgccat

SEQ ID NO: 1040548 - DNA, 120 bp, Artificial Sequence
  ENSG00000182586_14 (sequence is synthesized)
accgcgaggactcgaggggctattttaaaatattttctgtttccttgatttctcctcctttggatgtattgggcttcctgactctttgaagaatctatccagtgtctttaagtaggagaa

SEQ ID NO: 1040549 - DNA, 120 bp, Artificial Sequence
  ENSG00000182586_15 (sequence is synthesized)
agtgaccatgagagtctgtagctgtaacgaagccacagagctgtggctttctttccccttcagctctaggaaaggttatctgccctgcacagatctccggaggcctggctgggctctgag

SEQ ID NO: 1040550 - DNA, 120 bp, Artificial Sequence
  ENSG00000182586_16 (sequence is synthesized)
agcatcagactgattatcgtaagaaaataatctctgcagacacattccttgctagaagcaggggacaaagcccagcttcaaagacaattccacacacgccctccctgccctgcacagctg

SEQ ID NO: 1040551 - DNA, 120 bp, Artificial Sequence
  ENSG00000250842_0 (sequence is synthesized)
gtttttgagtttcagtggaagactctgacgtttcaaataccaaggctctttacgttgttgggacccaatttgttctcctctacggtcactaaaaatataatggctctacaattaactaca

SEQ ID NO: 1040552 - DNA, 120 bp, Artificial Sequence
  ENSG00000250842_1 (sequence is synthesized)
aggaagtatgttgcaaggtagtccaagtgcacacactgcaaggcagagatacaaacatcacatccagcaagcaaataagagtgtatctgtgcctgaaacaaggatactaaggtcatccac

SEQ ID NO: 1040553 - DNA, 120 bp, Artificial Sequence
  ENSG00000250842_2 (sequence is synthesized)
aacagtgagtaaaacagagtgactgcaacatgttcttcatttttgtcactgctttttaatacattacttcagatttcaatgtaaagttttgaataaaaggaatcattatatacatgtttt

SEQ ID NO: 1040554 - DNA, 120 bp, Artificial Sequence
  ENSG00000250842_3 (sequence is synthesized)
atttgtttttgaaacagatgttctctctttttgaagaataaatcacattttatttccctccagctttattgaaatataattgacaaacaaaattaaataaatctaaagtgtgtaatataa

SEQ ID NO: 1040555 - DNA, 87 bp, Artificial Sequence
  ENSG00000228136_0 (sequence is synthesized)
cttctgggcactggatcagcggatggctgaggagaggcactccctgcagggcaaatctggagattttctcaagcctctttatgaaaa

SEQ ID NO: 1040556 - DNA, 120 bp, Artificial Sequence
  ENSG00000228136_1 (sequence is synthesized)
gtatacaaacctctactaacttcttgggcttctgaataaaggaaaggactacctaatgactgtaatagcttgactgctgaagaattatgtcaattaataaaaattgcttcataggaaaaa

SEQ ID NO: 1040557 - DNA, 120 bp, Artificial Sequence
  ENSG00000228137_0 (sequence is synthesized)
caacagcatcaagatcatcaggagagatgcaccatgggacgcatcagcagtgactgatctgccccagagcaagtgcagccaaagctctccgtgcactaaatactgactgtactccagaca

SEQ ID NO: 1040558 - DNA, 120 bp, Artificial Sequence
  ENSG00000228137_1 (sequence is synthesized)
gtagttatcttacttcctgtagttattttaattcctggcccctctttccctaaatccaattgttagcaaagactcccctcaacctttttttttttttgagaagggggtcttattatgttg

SEQ ID NO: 1040559 - DNA, 86 bp, Artificial Sequence
  ENSG00000228137_2 (sequence is synthesized)
aacctttttttttttttgagaagggggtcttattatgttgcccaggctggtcttgaattgctgggctcgagcagtcctcctggagc

SEQ ID NO: 1040560 - DNA, 120 bp, Artificial Sequence
  ENSG00000228135_0 (sequence is synthesized)
cttctggctttcatctttctcctgtgctagatgcttctgttcattcctcctgcccttagacatcggactccaggttccttggcctttaaactcttggatttacaccaatggtttgctggg

SEQ ID NO: 1040561 - DNA, 120 bp, Artificial Sequence
  ENSG00000228135_1 (sequence is synthesized)
ccaatggtttgctgggggctctagggcctttggccacagactgaagcctgcacggtcagcttccctgcttttgaggcttttggactcagactgagccgctactggcttctttctccccga

SEQ ID NO: 1040562 - DNA, 120 bp, Artificial Sequence
  ENSG00000228135_2 (sequence is synthesized)
gcttgcagacggcctatcatgagacttcgccgtgtgatggtccaaacacaaaggcctcccgaccttagagttctgcgtctggatgtttttggctacaaaaccagaaaactccttctcaac

SEQ ID NO: 1040563 - DNA, 120 bp, Artificial Sequence
  ENSG00000228135_3 (sequence is synthesized)
tggcttaaacaggaaaatgaggtcacttctgacccagagactctgtcatcttaccctctcctgggggtcttcatctaaagaactgccactgggatcatacagtgtgctctcatctggaac

SEQ ID NO: 1040564 - DNA, 120 bp, Artificial Sequence
  ENSG00000228135_4 (sequence is synthesized)
gggtggggttgctgcccacatggtcggggctgctgccaatgccactcatctcaccgtcacttgctgcctctctgcctgccccctggtccatggttctctgacatctctctctccttgagg

SEQ ID NO: 1040565 - DNA, 120 bp, Artificial Sequence
  ENSG00000228135_5 (sequence is synthesized)
actgtccactgagaggtctggaaacaatgacactccaggaacaatgacactccagaaacaatgacactccaggaacaatgacactccagaaacaatgacactccaggaacaatgagcaca

SEQ ID NO: 1040566 - DNA, 120 bp, Artificial Sequence
  ENSG00000228135_6 (sequence is synthesized)
tctagcacccagatcttggcttctacacatcattctctattaaaagaaagaagcatcccttggagcaatggctgattccagagctgtggcagagaaattacaagataagcctggaacatc

SEQ ID NO: 1040567 - DNA, 120 bp, Artificial Sequence
  ENSG00000228135_7 (sequence is synthesized)
ttgctgtgacagaaagtaagcaagtgctcaaagaattatggcaatagaaaccagcttggcaactggacaaaatctgggaaattgagcatcaaaataaataatgaggtaatgaggaaaaca

SEQ ID NO: 1040568 - DNA, 120 bp, Artificial Sequence
  ENSG00000287821_0 (sequence is synthesized)
acggcgcgagaatgccggttgtgactcgcaacgcccgggagttgcctacaaggaaactgagtctgtgtgcggatgcctgttttctgggcatcggctgctcgataaaactcagtggcgcat

SEQ ID NO: 1040569 - DNA, 120 bp, Artificial Sequence
  ENSG00000287821_1 (sequence is synthesized)
gtttgtcacccttttgccctgttccgtggtgcgcaggcgttgtcgtgcgcgtgccttcgactatctaaaacttactgtacccccttctccattccccttgtcatctctgcctgttgtgcc

SEQ ID NO: 1040570 - DNA, 120 bp, Artificial Sequence
  ENSG00000287821_2 (sequence is synthesized)
cttggttcatcctaaaagaatggcttcagtagggaatctggttgccatggttattatcgtgcttatcaccgtggtgccagccacagtgatgggtatgttttctgaatctggggcatttgg

SEQ ID NO: 1040571 - DNA, 120 bp, Artificial Sequence
  ENSG00000287821_3 (sequence is synthesized)
agttttggacacgttaagtttgagtgcctctgggatttccaggtagagattcccagtgggtgactggaggcttgggagtgaaggtaggtcactcaaggatagagtttaggggtaagatga

SEQ ID NO: 1040572 - DNA, 120 bp, Artificial Sequence
  ENSG00000287821_4 (sequence is synthesized)
gaagagggttctccccttgaaatacaccgtaattctttgagccaaaaatctcaaccgtaggcgtcatacaatgctggtgggatggtatagagcgtttcgagaaaacaatttagcaatatg

SEQ ID NO: 1040573 - DNA, 84 bp, Artificial Sequence
  ENSG00000287821_5 (sequence is synthesized)
gatggtatagagcgtttcgagaaaacaatttagcaatatgtatcaggaacctttaaaatgtccatcccaggccaggtgcggtca

SEQ ID NO: 1040574 - DNA, 120 bp, Artificial Sequence
  ENSG00000233616_0 (sequence is synthesized)
aaaaataactggtagaccgtcttttctaccccataggttgaaggcaggagggagaccgacctgccacagaaacctgcaagggtgtactgccacatcgttctgaaacccaagctgcaattg

SEQ ID NO: 1040575 - DNA, 120 bp, Artificial Sequence
  ENSG00000233616_1 (sequence is synthesized)
tgaccaagtgtggagggaaaccaactttgaatgaaacacgaataacagataagatagtgaagaaagtgcttcactgtgattctcttaatagtactcaataaaagtatcttttaagtttta

SEQ ID NO: 1040576 - DNA, 120 bp, Artificial Sequence
  ENSG00000237499_0 (sequence is synthesized)
caggtatagaactattgaatggtacagtttgagatcttcgaaaccatcaggactgatcattttctggctactttctacataggaatcctagagttccttggagaggatatgaaggttatt

SEQ ID NO: 1040577 - DNA, 120 bp, Artificial Sequence
  ENSG00000237499_1 (sequence is synthesized)
ctcaggccatgcagatgggcaagaaaggatgtgcgtccatggttcctcttcaaatccaaccaaaacagccttgcttccgttggctttatataatactgcaactcttgataatctgattta

SEQ ID NO: 1040578 - DNA, 120 bp, Artificial Sequence
  ENSG00000237499_2 (sequence is synthesized)
acacaaatttcctcattgagtttctcctcatgaagaaacggcctcagtgaggtaaatcggaatgcacaggagcacatagcaggctggagtgtagtggtatgatcacagctcactgcagcc

SEQ ID NO: 1040579 - DNA, 120 bp, Artificial Sequence
  ENSG00000237499_3 (sequence is synthesized)
caggctggtcttgaacttctggcctcaagaaatcctcccacctgggcctcccagagtgctgggattacaggaatgcaccactgtgcccagccctaaataactatttttatttccctttct

SEQ ID NO: 1040580 - DNA, 120 bp, Artificial Sequence
  ENSG00000237499_4 (sequence is synthesized)
ctatttttatttccctttctgtaaccgctcatcttttgtgcatttttccttgggtattggccttcttatcaaagtttaagaactgtttatatatagggattaacccttagtctgttgtat

SEQ ID NO: 1040581 - DNA, 120 bp, Artificial Sequence
  ENSG00000237499_5 (sequence is synthesized)
gaattgcaaatatacatgtatttttatttgtatatgcaaagtttgtcttttatctttgtatatgggatagttttccaaacacagttttattttattttatttttcatcttgcatgtcttt

SEQ ID NO: 1040582 - DNA, 120 bp, Artificial Sequence
  ENSG00000237499_6 (sequence is synthesized)
ccaaagtaccaagcagagtttttttaaaagttgttttatggcttctgggttttttaagtcatatttagaaagatctttcccactctgaaattaaaaaaataaataaataaaatctcccaa

SEQ ID NO: 1040583 - DNA, 120 bp, Artificial Sequence
  ENSG00000237499_7 (sequence is synthesized)
gcagtgacctcaactcccagcacttcaaaacccagacagaaacgtccaacaaactcccagtccaggagcgctgcaaaaccaacgccagttgtttttctgcagaaaatcatcaactgtgga

SEQ ID NO: 1040584 - DNA, 120 bp, Artificial Sequence
  ENSG00000237499_8 (sequence is synthesized)
gaagaagaagggaaataagaaagaaagaaaaccctaaaaaccaccctggcgcccgggcccgcaggcctcgggccggctctgaaaagtttgggctgtgcacgtgatgagcgcgtaggcggg

SEQ ID NO: 1040585 - DNA, 120 bp, Artificial Sequence
  ENSG00000237499_9 (sequence is synthesized)
agccccagacaggacccgggcgggcatttcgagaaaaagcagcggtgacagcctttggtccccatctccattgttcctgccagctctggaccccaggctgcatgagacgtaggtcccagg

SEQ ID NO: 1040586 - DNA, 120 bp, Artificial Sequence
  ENSG00000237499_10 (sequence is synthesized)
ggacacccgaccccgtggccccagtcttagagttggcctgtttcctctcatctctggctccatgacttcaatcctcctgcagcttccactgcccctatctggctcatgtcttgctgtctg

SEQ ID NO: 1040587 - DNA, 120 bp, Artificial Sequence
  ENSG00000237499_11 (sequence is synthesized)
gtgtcatgaactgggagtgcagtaaagaggagtgacaagcctgaggggccacgttcatacctgccactgccaactgtcctgatgtaactgctttgtcatcttgcctgccaggatttgtga

SEQ ID NO: 1040588 - DNA, 120 bp, Artificial Sequence
  ENSG00000237499_12 (sequence is synthesized)
caagtctagtttggggtctctataatcctgctcctttggctgccagccatctccataaaaaaagaatttgaaaggcttccattctttcagagacctgtttcccgggactggctgcaaggg

SEQ ID NO: 1040589 - DNA, 120 bp, Artificial Sequence
  ENSG00000237499_13 (sequence is synthesized)
actgcttttctgagaggccaggtggcaggatgtgggacgactccagctgacaaagacagtctaaccgtggggtaggggctggagcaggggccagcgacccacgtctacatgcatacttct

SEQ ID NO: 1040590 - DNA, 120 bp, Artificial Sequence
  ENSG00000237499_14 (sequence is synthesized)
cttacactgctgctactggaaaagctgaaccccgcgccaggaccccagccccctgcaaggacccgtgagcgtctgggaagctgtctctgggactgaagccccccacctccgccgggctgg

SEQ ID NO: 1040591 - DNA, 120 bp, Artificial Sequence
  ENSG00000237499_15 (sequence is synthesized)
cggccactgcggtaccctacgccccgtcgggctggtcctgcacaatttgggaaaaagccgcagcgcttctgcaaggtctacgtggccatgagcatgcaacgcttggctccaaaaaagaca

SEQ ID NO: 1040592 - DNA, 120 bp, Artificial Sequence
  ENSG00000237499_16 (sequence is synthesized)
cgaaaggagcaaagcgccaacgaccacccgatcggagggcccgaggggcgcctcttcaccagtcagctgcagcttaagttccgtgcattatctgaaaggaacagctggctggaggtatcc

SEQ ID NO: 1040593 - DNA, 120 bp, Artificial Sequence
  ENSG00000237499_17 (sequence is synthesized)
cgactacaataacaaacagctgttgccgaggcattgctgttgacgtgttacctttgaaacctccctcctgttatggaataagcctcttccagatcatggctcattatcatctagtctgac

SEQ ID NO: 1040594 - DNA, 120 bp, Artificial Sequence
  ENSG00000237499_18 (sequence is synthesized)
aagcagccttgttgccacggagacccaaagggatcaggcgtggcatttgcctgcatcatcaccccctccaggggaactataaggactcttctgtgcgtcatgcgtggctgtcctgggact

SEQ ID NO: 1040595 - DNA, 120 bp, Artificial Sequence
  ENSG00000237499_19 (sequence is synthesized)
ggctgccaccagacttttcctgcgggtaaaacctaaacaaatgatcagctgcagataatatcaagacctctgtttgatatgttaatagtgacagccagatttccacaattaacaacgagg

SEQ ID NO: 1040596 - DNA, 120 bp, Artificial Sequence
  ENSG00000237499_20 (sequence is synthesized)
tgggaagaaaacactgtagtcaccagacttgggaggagagggtttgtattcacataaacacaacctcacgtcactgcttgccaccacaaagggctctgttcactgttttgttctcaaaga

SEQ ID NO: 1040597 - DNA, 120 bp, Artificial Sequence
  ENSG00000237499_21 (sequence is synthesized)
tcatccttgcgctcatcctctgatcttgaatttctacataactttctcagtttatatgccctgtggcaagtgcagcaagcactgtttcctgtttctaaacttgtagaaaatcatccatac

SEQ ID NO: 1040598 - DNA, 120 bp, Artificial Sequence
  ENSG00000237499_22 (sequence is synthesized)
atcttacagttgtcagttttaaccagataacagtggcactttgttgctgcttttttatctttagcttaggttaacaggaccctggaagtaaagttgttgatttattcaatagagtattct

SEQ ID NO: 1040599 - DNA, 120 bp, Artificial Sequence
  ENSG00000237499_23 (sequence is synthesized)
caattaatttggctagatttctacatgattcaaaatctaaaaaagtagaaatgcatgcttacatgtctaaggcctgaaaaattggtagtgacatcccaaaataaatgaaggttttaaaac

SEQ ID NO: 1040600 - DNA, 120 bp, Artificial Sequence
  ENSG00000237499_24 (sequence is synthesized)
gaaaggattgggaggaagaatgaaaagatacctttcctttagacatttctaagcttgcaaatgcacaggcaatgagaaccacctctcttcactccctggcatttgaggctttttacgtaa

SEQ ID NO: 1040601 - DNA, 120 bp, Artificial Sequence
  ENSG00000237499_25 (sequence is synthesized)
aaatttaaactaatgattatattagaaatttttaaatgtttaaaaaaagtatgttgtaaaattgaggaaatatagtattttgagagtccaaacacgttcatgcagttgattgagcctaag

SEQ ID NO: 1040602 - DNA, 120 bp, Artificial Sequence
  ENSG00000237499_26 (sequence is synthesized)
tgttgggttaatcctagtaagtgattgatctttttaggtaggtaagggaataaacagaagatcagaaaagaagaggtactactattacattttaagtttccaaatatactactaagtgtc

SEQ ID NO: 1040603 - DNA, 120 bp, Artificial Sequence
  ENSG00000237499_27 (sequence is synthesized)
gtgttcctgagaaagactaaaccagttattttctcctttcatgtttgaatgaataaccatcagcaagggagagatgcactgaccttctgccaggaatcctagagttccttggagaggata

SEQ ID NO: 1040604 - DNA, 120 bp, Artificial Sequence
  ENSG00000237499_28 (sequence is synthesized)
gaaatcaaacccaggctttctgactgctcaatagaccacaatctaccatgctaccatggaaactttaaaacagatgaaagtaaaaacaaacaaacaacaacttaaaaaaacaaaaacaaa

SEQ ID NO: 1040605 - DNA, 120 bp, Artificial Sequence
  ENSG00000237499_29 (sequence is synthesized)
aggaggtgtcttcaaaagcatcaaggaaaaaatatcaaatattttgatatttgatatcaaatatcaaaatttgccatggtgcccagcatggttcaagatcataagtgtcaagcacatcag

SEQ ID NO: 1040606 - DNA, 120 bp, Artificial Sequence
  ENSG00000237499_30 (sequence is synthesized)
ggggtttctctcacttcataagagcagtaaacactaaaccaagggaatgtgaatttagaggttagaaaagataaccagagatttggccgtgcgtggggctcatgcctgtaatcccagcac

SEQ ID NO: 1040607 - DNA, 120 bp, Artificial Sequence
  ENSG00000237498_0 (sequence is synthesized)
gggagatggatttgagactgagctcccatctcctctgctgcagcaccctattaaagccttcttccttggcaatacttgtcttctcagtgattgcctttctttgcggtagatttaccttac

SEQ ID NO: 1040608 - DNA, 120 bp, Artificial Sequence
  ENSG00000237498_1 (sequence is synthesized)
agtgagtccatataaaatactggaaaaatgcaagagagttgaaccaaaagatggtttcctgtgtctagttcagcttgagctgcaacagtttctcccaagtgatgatcacgatcactttct

SEQ ID NO: 1040609 - DNA, 120 bp, Artificial Sequence
  ENSG00000237498_2 (sequence is synthesized)
ttgtggccacctctacatgaccttcgtgcccagtattgctcctttcacctgttccctgaggcaaatagatggtaacatctctactgccacaagtcacaggagagtaactaatggaaacag

SEQ ID NO: 1040610 - DNA, 120 bp, Artificial Sequence
  ENSG00000237498_3 (sequence is synthesized)
cttcaggaaacagacttaaagatgggtttcatcgattggattgaaaatatatttgagagcattggagatatcattcttgctgtgagagatggaaataatacatgttgtgtgttggcaaca

SEQ ID NO: 1040611 - DNA, 120 bp, Artificial Sequence
  ENSG00000237498_4 (sequence is synthesized)
aacccaagacagagagcaggattgaagatgaatctgcataaacaaactatactaaaataacccctgtcctactccatttgtgctgctataacaaaataccagagactgggtaacttataa

SEQ ID NO: 1040612 - DNA, 120 bp, Artificial Sequence
  ENSG00000237498_5 (sequence is synthesized)
agagcaaacatttatttcttacagtatgcaatctgcaaagtttaaaatcaaagtatcagcaaaattgctgtctggagatggctgctctccacttccaagatggagccgtgttactgcatc

SEQ ID NO: 1040613 - DNA, 120 bp, Artificial Sequence
  ENSG00000237498_6 (sequence is synthesized)
ctcagaaggggagaaaagctgtgtcctcatgtgatggaatggatggaggggcaagaagtgtaagctctttctgaagcctctttcataagggcattaatctactaatgagggcagagctct

SEQ ID NO: 1040614 - DNA, 120 bp, Artificial Sequence
  ENSG00000237498_7 (sequence is synthesized)
catgacttaaccacttccccttaagccccacctcttaataatacctaagtttcaacataaattttagagaggacaccacattcaactcatagcagacgttatgttttcttagtttcccca

SEQ ID NO: 1040615 - DNA, 120 bp, Artificial Sequence
  ENSG00000237498_8 (sequence is synthesized)
tatgttttcttgtcattttcctataatttttagccttagaaaatcaagtccctttcctttgtctagacagctctccataatttactgctgtttgttaaaatggttaaatttaaaattaaa

SEQ ID NO: 1040616 - DNA, 120 bp, Artificial Sequence
  ENSG00000237498_9 (sequence is synthesized)
gagaatttcccttagccatcagaagccatttcatcttgaaatgcctgggaggtaatttcttcatcctagtactgtccttatccagccaataatggagtcataaaagtgtacaatattcta

SEQ ID NO: 1040617 - DNA, 120 bp, Artificial Sequence
  ENSG00000237494_0 (sequence is synthesized)
tgaggaagaagaggtcagagttctggaatcagaaagagcaagtaggaagggtgctgcacctaaggactctagatccttggtttgggactgggcctcacacatgtaatgtgaggctcttga

SEQ ID NO: 1040618 - DNA, 120 bp, Artificial Sequence
  ENSG00000237494_1 (sequence is synthesized)
gattccttcaacctacacagtgaccaacctcatctcctccaaatttcaggttgtgctgcagcctaatcaatcagcaatctgaataaaaataaaactggaaagttatcctttccaatcacc

SEQ ID NO: 1040619 - DNA, 120 bp, Artificial Sequence
  ENSG00000237491_0 (sequence is synthesized)
actggtggccgggcgggatgtaaccggctgctgagctggcagttctgtgtcgctaggcttctgcccggccgccgccgcacataagccacgaggaggagctttacgacttcccggtcttcg

SEQ ID NO: 1040620 - DNA, 120 bp, Artificial Sequence
  ENSG00000237491_1 (sequence is synthesized)
gcgccgggcgcagcaagggccagactctgcgctagcaggcgctgcgcgccaaccggccggcacctgtcgcagaaggtgcaaccgatcgcactgtcgcgcagaagctcctcaatggccagc

SEQ ID NO: 1040621 - DNA, 120 bp, Artificial Sequence
  ENSG00000237491_2 (sequence is synthesized)
gccagctgcagccccggccgcccactcgcctcatctgagcctggagacagatctcattatgttgcccagggtgatccttgatctcctggcctcaagtgatcctccaaccttggtctccca

SEQ ID NO: 1040622 - DNA, 120 bp, Artificial Sequence
  ENSG00000237491_3 (sequence is synthesized)
aagtgctgggattacagatgtgaactaccacacccagtcaacgtgcagaaggttttcagtttgatgtagtctgatgtagtctcatgtatttatccttcttgttgttgcctgagcttttgg

SEQ ID NO: 1040623 - DNA, 120 bp, Artificial Sequence
  ENSG00000237491_4 (sequence is synthesized)
atgtaagataagggtccagtctccccagtgttggatatccaattttcataacaccatttattgaagagattattctttctccactgtgttttcttgatgtccttgtcaaaaattagttga

SEQ ID NO: 1040624 - DNA, 120 bp, Artificial Sequence
  ENSG00000237491_5 (sequence is synthesized)
cttttatatgcttgggtttatttctgggctctattctgtttcattgctttacatctctgttttcatgccagtgccacagtgttttgattactatagctttgtaatataatttgaaatcag

SEQ ID NO: 1040625 - DNA, 120 bp, Artificial Sequence
  ENSG00000237491_6 (sequence is synthesized)
aatgtgtaatacctataactttgttttttgctctaaagatttatttatttatttatttttgccatttcaggtcttttgtggtttcatatgaatttcagaattgtttttcctatttctgtg

SEQ ID NO: 1040626 - DNA, 120 bp, Artificial Sequence
  ENSG00000237491_7 (sequence is synthesized)
aaaaatgccattgacattttgatagggattgtgttgaatctatatattgctttggatagtatggatgttttaacactattaattgtcccaatccatgaacatgaaatatctttccattca

SEQ ID NO: 1040627 - DNA, 120 bp, Artificial Sequence
  ENSG00000237491_8 (sequence is synthesized)
ctctgttcacggaaagggcctgggagctgcaacacctcaacagcaacaagcacacctgctacctagaacttggtttctaaaaaccatcctcctctaaaaggaaacagagctctttgaaga

SEQ ID NO: 1040628 - DNA, 120 bp, Artificial Sequence
  ENSG00000237491_9 (sequence is synthesized)
aacgaaggtaagcatgagcaaattactttttagaggtaactttgctgaacttgtgaagaatggtgtgcaaggtccagagcgactgcaggagagggaaggtgggattcccacagagcagga

SEQ ID NO: 1040629 - DNA, 120 bp, Artificial Sequence
  ENSG00000237491_10 (sequence is synthesized)
tcaccagttccctcgctccacctctgagaggtggtttggagaaacacagcccttctcaagagggctgcaagctacttaagtcctgaaaatttccacaaggctgagtcaaatctgcgtttc

SEQ ID NO: 1040630 - DNA, 120 bp, Artificial Sequence
  ENSG00000237491_11 (sequence is synthesized)
atcatctataagaaaggtacctatcgagaacaccctgctggccagtgtgtaaatatctaaaggaggactcagaaaacaccggggaagtccagcctgcacgtggtggctgggcttcagtga

SEQ ID NO: 1040631 - DNA, 120 bp, Artificial Sequence
  ENSG00000237491_12 (sequence is synthesized)
agcatgcagcacaacaggagttagcagaccacaaagagcatgtctggacctagaaccacagcatgtaacctcggaagcagtgagacaccagccagcatggacaagcagcaggcacttgct

SEQ ID NO: 1040632 - DNA, 120 bp, Artificial Sequence
  ENSG00000237491_13 (sequence is synthesized)
gtgagggtgtggagacatgacgtggtgcagggacaccagcacccagtcctagttctggtccctctcagccttgttaggtcctggttcctaagattccagggaacatccccacagcctcac

SEQ ID NO: 1040633 - DNA, 120 bp, Artificial Sequence
  ENSG00000237491_14 (sequence is synthesized)
ttcatgagcactaaattttgttttttacaaactaggttagattctgtcaaataatcgtctaatggtgtattcgagtgtatattaaggatctgattcattctatacccactaaccataacc

SEQ ID NO: 1040634 - DNA, 120 bp, Artificial Sequence
  ENSG00000237491_15 (sequence is synthesized)
aaacagattaagttttctttctcagaatctaatccttcagtttcttggaagctggactagtttcagagcatctacaaacatttctggaatatttaacttaccctgaaataacagacgata

SEQ ID NO: 1040635 - DNA, 120 bp, Artificial Sequence
  ENSG00000237491_16 (sequence is synthesized)
gacagtaattccctaaattattttccccagttgttgcaaaataaagcaaatgcagagtttctaggactataaaaggaactcaacttcccggatcctagtaaagaaacaggaaacagcttg

SEQ ID NO: 1040636 - DNA, 120 bp, Artificial Sequence
  ENSG00000237491_17 (sequence is synthesized)
aagctctctggtttgttttatggctcatgaaaaagctttagcccaacttggcaaaagaaaggcagggaaagagttcatatggctctgcacaaacccaacccaattactaatttcatgtta

SEQ ID NO: 1040637 - DNA, 120 bp, Artificial Sequence
  ENSG00000237491_18 (sequence is synthesized)
gccactctttatgtggaatgagagggctcacagatgccctgccctccaaaacacgccacagggaggacacattcccatcagcatcaggggttcatgctaacacagagaaaatgcgtatga

SEQ ID NO: 1040638 - DNA, 120 bp, Artificial Sequence
  ENSG00000237491_19 (sequence is synthesized)
ctgcaggagtccatgcttggtttaaatagccctgctgttgactcagatatgtacaggtaggcaggaaccacacactgtacacatataccacatgccaccacacaccatacatcccacaga

SEQ ID NO: 1040639 - DNA, 120 bp, Artificial Sequence
  ENSG00000237491_20 (sequence is synthesized)
ccaatgtgtgcataaatacatgcacaaccatacatacacaccatacatacaacacacatacaccatacacacaacacacaccaatgtgtgcacaaatacacagccacataccacatgcac

SEQ ID NO: 1040640 - DNA, 120 bp, Artificial Sequence
  ENSG00000237491_21 (sequence is synthesized)
taaggcttacaattatttaactccctaaattttctgtcctcccagtagcactttcaaatgcctaaaagcaattaaaagaaacatttttccaatgtctcacagaaccattagaaacacaaa

SEQ ID NO: 1040641 - DNA, 120 bp, Artificial Sequence
  ENSG00000237491_22 (sequence is synthesized)
attaatagcttcataaactatagcttctattttatccataatagaatgaaggtgcataaaccacatagtaattaatctttggacaaaagcaaacaataaatggaatatatggctaagatc

SEQ ID NO: 1040642 - DNA, 120 bp, Artificial Sequence
  ENSG00000237491_23 (sequence is synthesized)
ctttctttttgagtgtggcccaagataaaaatttcttccaaaagggtaacattaatgcaataaggcttttgtggaattctattttgtacgaaattcctgttttctattagctacttcttc

SEQ ID NO: 1040643 - DNA, 120 bp, Artificial Sequence
  ENSG00000237491_24 (sequence is synthesized)
ctctgtgacacaagcctcattccttgtgaaaaacacgaagcagaaaacattcgtgaaatcatcaggtaaagatcccatgaccgttctatcactgacacagtatgtaggtacatggtacaa

SEQ ID NO: 1040644 - DNA, 120 bp, Artificial Sequence
  ENSG00000237491_25 (sequence is synthesized)
cccccaagggaccaccttgtggcatcctcagcaaccacagagccacagggcagatgagtgtttgctcccactgaggctctgcaacctctgccaccaatactggagaaatcctccaacctc

SEQ ID NO: 1040645 - DNA, 120 bp, Artificial Sequence
  ENSG00000237491_26 (sequence is synthesized)
actgttttctcctgaacttgttcccttctgtttttcgattaatacacagcaaacaggcacaccttcaagctgccaaaagcatcttaaacgttgtacacttacaatcttcaaaatatagtt

SEQ ID NO: 1040646 - DNA, 120 bp, Artificial Sequence
  ENSG00000237491_27 (sequence is synthesized)
gttcaaaagagtcatcaaagtagtttttgaaatagaacacttactttgaccacataattgaaccttcggatatcttgaattgcacttgagaagtctaaccgattaaaggcttctcccaag

SEQ ID NO: 1040647 - DNA, 120 bp, Artificial Sequence
  ENSG00000237491_28 (sequence is synthesized)
gtgcaatagccatgcctctggaagagcaacacagaatttaaaattagtcaattagccaaaaagaattggcagttaatgtcaattaattgtgcgattaaaaaaatttttggcaaaggacaa

SEQ ID NO: 1040648 - DNA, 120 bp, Artificial Sequence
  ENSG00000237491_29 (sequence is synthesized)
ccagctgcagccccggccgcccactcgcctcatctgagcctgggcaaatctggattgggaaagttgacattaatcaactcattattcctcacagatttgtattctccagagtatccaggt

SEQ ID NO: 1040649 - DNA, 120 bp, Artificial Sequence
  ENSG00000237491_30 (sequence is synthesized)
ccttctcagagaattaaaaagcctgtacagcgctgctctaagctgttgatgaaaaatattgttggtgagctctgcttaggtaatatataggacatgagcagagaggaggcacgtgaacag

SEQ ID NO: 1040650 - DNA, 120 bp, Artificial Sequence
  ENSG00000237491_31 (sequence is synthesized)
gaatatctttttgtacaagaaagtaaggcaatgctcaaagaatgatggagacatgcccaaaaaaagcagagaagccaacttgaaaagattccaacaggccaaatatggggcgatttgaac

SEQ ID NO: 1040651 - DNA, 120 bp, Artificial Sequence
  ENSG00000237491_32 (sequence is synthesized)
ccatctaacatcctaaactccagctctgaatgtctgtctcctgctctgaatcttcagtgacttcgaaactcaagtcaggacacctctcagtttggcctcactgctcaagattgagctgaa

SEQ ID NO: 1040652 - DNA, 120 bp, Artificial Sequence
  ENSG00000237491_33 (sequence is synthesized)
ttcatgaccataattcaagcattcagattcatgggctgttttgtgggttttgctatctcttattttgtttttgcacatcttacccactgaaacgttgggctgcaaaaagtttgatcacta

SEQ ID NO: 1040653 - DNA, 120 bp, Artificial Sequence
  ENSG00000237491_34 (sequence is synthesized)
aatatgtaggcaatgctggatactgggctgttatttacatatttgtatcaccttttatttcataagatagcattgtcagagtaatttagtatttcaacataatcaacaagtaaaataaaa

SEQ ID NO: 1040654 - DNA, 120 bp, Artificial Sequence
  ENSG00000237491_35 (sequence is synthesized)
aaccaccgaccttttctcctctgccctccactcacactctgctccatcaccctcagccacacagctgacgctgtagagattcactgacatccagtctgatggacactgtttctccagccg

SEQ ID NO: 1040655 - DNA, 120 bp, Artificial Sequence
  ENSG00000237491_36 (sequence is synthesized)
aaactgctcatgagaacatgtgcagtgaagtgctccagaggccccagcatgctacattacagaagactgaactcaggagagatgaggaataatcccctccatcacaccagacaccaggag

SEQ ID NO: 1040656 - DNA, 120 bp, Artificial Sequence
  ENSG00000237491_37 (sequence is synthesized)
ggtgtgccaaggtattctaataatactgcgtgacattacggacaacttagcctaaattatggaaaatcaaattatttagtagaactgcaagacaatcctctcagttgttgtaaggtaact

SEQ ID NO: 1040657 - DNA, 120 bp, Artificial Sequence
  ENSG00000237491_38 (sequence is synthesized)
catcctgccactaacagatttctccaaacatctctgcacctcagagtgcaaatacaatcaaacatttcactccattgataggaagcatccttcactatcttctaccaagggcttcctcct

SEQ ID NO: 1040658 - DNA, 120 bp, Artificial Sequence
  ENSG00000237491_39 (sequence is synthesized)
ttggtgcttcaaaattttttatgaaaggaacatccattttattcaaagcacctccaaacctgcaatcctaagttccaggcaactcaatcccaaaaatccactgtagatgcccaaaggctg

SEQ ID NO: 1040659 - DNA, 120 bp, Artificial Sequence
  ENSG00000237491_40 (sequence is synthesized)
gggtgttcggtcttcaacatttttgcctttgtggctcccagtcaagatagagctgcaccaagtccaattccattcctcatcacagatgattttttctactttaagatcagaactatacaa

SEQ ID NO: 1040660 - DNA, 120 bp, Artificial Sequence
  ENSG00000237491_41 (sequence is synthesized)
gcttcttgctttgtgtcagcatgctgttgtacccatgggcaaattcttaggtaagacaaaaacacagtcccaagggcaggtagtaattttttcagaaaaaggtaaggcaatcatttatct

SEQ ID NO: 1040661 - DNA, 120 bp, Artificial Sequence
  ENSG00000237491_42 (sequence is synthesized)
cagtctgcccaggacagtcccaatttacacatgtatattctcccaatctgtaggctgtcttttcattttgttgattatttcacttaattttttattatttatttattttatagagacaga

SEQ ID NO: 1040662 - DNA, 120 bp, Artificial Sequence
  ENSG00000237491_43 (sequence is synthesized)
tcttcttcaatttctttcatcaatgttttatagttttcattgtgcagatctttcacttacctggttaaatttattcctacaatttcattctttttgatactagggtaaattgaattattt

SEQ ID NO: 1040663 - DNA, 120 bp, Artificial Sequence
  ENSG00000237491_44 (sequence is synthesized)
aatttcattctttttgatactagggtaaattgaattattttcttgatttctataaattatttcttataatactcatacttgtcaggcctctgggcccaagcctgcatgtatacatccaga

SEQ ID NO: 1040664 - DNA, 82 bp, Artificial Sequence
  ENSG00000237491_45 (sequence is synthesized)
ttccttctcctggctcagaagctcccccgctgagcaccttgtgacccccgtgtccactacccacccaaatcctataaaacag

SEQ ID NO: 1040665 - DNA, 87 bp, Artificial Sequence
  ENSG00000237491_46 (sequence is synthesized)
ccagagaacaaccccctttgactgtaattgtccactacccacccaaatcctataaaacagccccacccgtctcccttcactgactcc

SEQ ID NO: 1040666 - DNA, 120 bp, Artificial Sequence
  ENSG00000237491_47 (sequence is synthesized)
ctgcctcggcctcccaaaatgctgggattgcaggcatgagtgaccgcacctggccacctttccacatttaagagatccctgggatactgcgaagcaggagtccatctccagacatgagga

SEQ ID NO: 1040667 - DNA, 120 bp, Artificial Sequence
  ENSG00000237491_48 (sequence is synthesized)
ggagtccatctccagacatgaggagcaggtgggctaaaggaaacaggactggggagtcttggaggggcagagcaatgcccagggacacagaaacttttgaataaagacaagagagaccga

SEQ ID NO: 1040668 - DNA, 120 bp, Artificial Sequence
  ENSG00000237491_49 (sequence is synthesized)
ttgtttttattttgaagactgattttagatttagatgagagtatagtaaaattgtagcaatgctaataatttaagctgtttatgtatacctgagacaccattaactgacattttttacaa

SEQ ID NO: 1040669 - DNA, 120 bp, Artificial Sequence
  ENSG00000237491_50 (sequence is synthesized)
cctgctgaagtaatgacaaagacaaatatttattaaatatcttgctggtttgttttgttggggacaaactggggtgtggacgatgttaaagctaagatcataaaaaaactggattcattc

SEQ ID NO: 1040670 - DNA, 120 bp, Artificial Sequence
  ENSG00000237491_51 (sequence is synthesized)
taggctacgcaactaaaaatacataaatcatctgattaactgcattgtaaggatgtaggtgttacaaatatctagttgaaacacaggatttctctgcaggggaggcatgcactgcccgag

SEQ ID NO: 1040671 - DNA, 120 bp, Artificial Sequence
  ENSG00000237491_52 (sequence is synthesized)
tttgaagtgtaacatgggatttctctccagagcagccatgcactgcccaggctggaagtatgctcaaccacaagggtcagggctgggagaggcgcttcggtagcaagaaggtgcctctga

SEQ ID NO: 1040672 - DNA, 120 bp, Artificial Sequence
  ENSG00000237491_53 (sequence is synthesized)
aaaccagcattgggatggagagggctgaaggcaagtgctggatgtgaccacgggcagctttcaggctgggagcacggatgccaagaacccaaaacaccaaaaaaactggtgcttagaccc

SEQ ID NO: 1040673 - DNA, 120 bp, Artificial Sequence
  ENSG00000237491_54 (sequence is synthesized)
acaggtccaagaaccgaaggaagaaaatgaaacaatttattttcagtactgtaaacactgctgctattctcttagatgtttttcttccatgatatacccttatcctgtattggtttgtat

SEQ ID NO: 1040674 - DNA, 120 bp, Artificial Sequence
  ENSG00000237491_55 (sequence is synthesized)
agattagcacattaggtttcagaagtcattttaaactccatcttcatcctccatatttgaaatatttaaaatctacagattttcaggtcaaagttgtagagataagtaagctagaaaaca

SEQ ID NO: 1040675 - DNA, 120 bp, Artificial Sequence
  ENSG00000237491_56 (sequence is synthesized)
ataatagaaaacatgagacgattggtctcaaattccaaacaggtgacttgagatgtcctagagaaagcagctggagccatagcacctttgtctctaacagccgatacactcagaggctca

SEQ ID NO: 1040676 - DNA, 120 bp, Artificial Sequence
  ENSG00000237491_57 (sequence is synthesized)
tgtgcttctgtgcgccaaccccaatcgccctgacgggtgcacaactcaactaaatatactcatttaaaacatccaaatatgttgactgagtgcctgctatgtggaaaacattttcctggg

SEQ ID NO: 1040677 - DNA, 120 bp, Artificial Sequence
  ENSG00000237491_58 (sequence is synthesized)
aactctggggaaaggaaacactcattttgatatagattataatctgaaatccatcacagctgatattccacacgatggtgtagcagacactttccaaggtcaccacccatctcacaaaag

SEQ ID NO: 1040678 - DNA, 120 bp, Artificial Sequence
  ENSG00000237491_59 (sequence is synthesized)
ttgaatattgaaattcgttaaaggaaatgagatatttatgtagtcttaaggtatcttctcacaaattatgtattacttacaaaggggaaaagtgcaccttgacgtgagaatcttggcaga

SEQ ID NO: 1040679 - DNA, 120 bp, Artificial Sequence
  ENSG00000237491_60 (sequence is synthesized)
actactttaatcaagaggtttagttgagcattatcagtaacagagtaaatcaaaatcataagccacttgatagatacaatgagaaaataaagcatcacttctgtgacaccctataaaaaa

SEQ ID NO: 1040680 - DNA, 120 bp, Artificial Sequence
  ENSG00000237491_61 (sequence is synthesized)
ataagctggaataatattaatacacacaaagcacgtgttgtaactttcattatgcttccttagaggtaagatgcaaatttgcccttagccagtgtaagatggtaaatatgacttcataaa

SEQ ID NO: 1040681 - DNA, 120 bp, Artificial Sequence
  ENSG00000136275_0 (sequence is synthesized)
ctcccaagtcatgtggaaatgatcgttctgcagcctgtttcgtggtctacagactctagctcaagctacaggatcaaggttctacccacagaaggttggcatctgagctgtgtatggttc

SEQ ID NO: 1040682 - DNA, 120 bp, Artificial Sequence
  ENSG00000136275_1 (sequence is synthesized)
taaggcttagaccacttgaagacttccccatcatgagatgccaggtcttttattgggtgctggttcttaactctggacttctctacaagttttgtcaaactatcaaatgcagagcaaatt

SEQ ID NO: 1040683 - DNA, 120 bp, Artificial Sequence
  ENSG00000136275_2 (sequence is synthesized)
cagagatgggaggcataagcaccacctactggcacaggctgtgcacttgcacggataggagagctgaaaagttggtcatggatggaaataactgctggtttcacaaatgaggaggcagaa

SEQ ID NO: 1040684 - DNA, 120 bp, Artificial Sequence
  ENSG00000136275_3 (sequence is synthesized)
aattccacttaatttcactattacaatgctcagcagaaaaaaaaaaacaaaacaacttggattactgagctacagaacacccagactcatagcactgggacttccaggtcttaccttacg

SEQ ID NO: 1040685 - DNA, 120 bp, Artificial Sequence
  ENSG00000136275_4 (sequence is synthesized)
agtgggtcacaacactgacaaaggggacaatatccattagccattatcttgctgcgtatgaataaccctctctcacaaaaataaagataaatatgttctgaaataattgataagattaaa

SEQ ID NO: 1040686 - DNA, 69 bp, Artificial Sequence
  ENSG00000136275_5 (sequence is synthesized)
attcttgtgatagtgaagaagtctcacaagatctgatcatttataatgggtttccacttttgcatctgg

SEQ ID NO: 1040687 - DNA, 120 bp, Artificial Sequence
  ENSG00000285928_0 (sequence is synthesized)
ttgtcacccaggctggagtgcagtgtgagaccctgactaaagagaaaaaaattaataaaatgttatttcataagaacaaaaaacacatttttaaatcaaatacctatgtaaagaaattat

SEQ ID NO: 1040688 - DNA, 120 bp, Artificial Sequence
  ENSG00000285928_1 (sequence is synthesized)
ttaattaaaagattggtaaagttttaaaatctcttagcaacataaaattagaattcctggctaatggttcatcttcttaatattcaaacccatcacatttattaagacaaattattaaat

SEQ ID NO: 1040689 - DNA, 120 bp, Artificial Sequence
  ENSG00000285928_2 (sequence is synthesized)
aaattattaaatgagatgactggtatctattcataatattaagtaagtcattgtttaaaatttgaaaactgaaagaaaataaataagtttctgagtcaggcatggtggctcacacctgta

SEQ ID NO: 1040690 - DNA, 120 bp, Artificial Sequence
  ENSG00000285928_3 (sequence is synthesized)
tgggaggttgaggcaggaggattgtttgaggccaggaattctaggttgcaatgagctaagatggtgccacagcactccagcctggttgactgagcaagacctcatttctataaataagta

SEQ ID NO: 1040691 - DNA, 120 bp, Artificial Sequence
  ENSG00000285928_4 (sequence is synthesized)
aaataaattcatttctcatacgcaacacctcaagattctaactgtaaatcaaaataagatatcaatttcattttaaaatgtttgacttattttaagttacattattttggttaaataata

SEQ ID NO: 1040692 - DNA, 120 bp, Artificial Sequence
  ENSG00000285928_5 (sequence is synthesized)
cagtttatattgtataaattttgtgatatataagtctacctttttttggtgccaaaacagaagtgatataactttatataccatcttcaaacttaatgagaataagcctatataacctag

SEQ ID NO: 1040693 - DNA, 120 bp, Artificial Sequence
  ENSG00000285928_6 (sequence is synthesized)
tctaactattcctattgtgtaattactactctgaagttagctgtgccaattttcaaggtttccttcataagtaagggagtgtaatgtataaaagccatagtaaaatataatttcccagtc

SEQ ID NO: 1040694 - DNA, 120 bp, Artificial Sequence
  ENSG00000285928_7 (sequence is synthesized)
tgaagcagatatgtttctgaaaacactgagataagaaaacgattaggatttaagttgtgaagggaaaaaaaatagttttaggcagaaccctaagaagacagtttttagattcactaaaat

SEQ ID NO: 1040695 - DNA, 120 bp, Artificial Sequence
  ENSG00000285928_8 (sequence is synthesized)
gaagattgtattaaataaagaggataagagtaaatttaattagtaataataaatactatatgatttacaattccttgatcactagaaatttttcaggatctcccattttcatagcttcaa

SEQ ID NO: 1040696 - DNA, 120 bp, Artificial Sequence
  ENSG00000285928_9 (sequence is synthesized)
taaaatgcttgcaaattcatttttggtttgttaaacataataggcacatcaagaaggcgatttttaaaaagtctaacctcattcctaatgtttaaacttttcagatcttatgattttcag

SEQ ID NO: 1040697 - DNA, 70 bp, Artificial Sequence
  ENSG00000285928_10 (sequence is synthesized)
tgcaatgttagccaggctgatctcgaaggcctgacctcaagtgatctgcccacgtcgggctcccaaagtg

SEQ ID NO: 1040698 - DNA, 78 bp, Artificial Sequence
  ENSG00000285928_11 (sequence is synthesized)
gacggggttttgcaatgttagccaggctgatctcgaaggcctgacctcaagtgatctgcccacatccggccaatctca

SEQ ID NO: 1040699 - DNA, 120 bp, Artificial Sequence
  ENSG00000285929_0 (sequence is synthesized)
agacttgattttctccttaatgttgacttgagaatctacctaactgctgtctgaaatgcaactccactctggctcttttcctactaagctgcgagctccttgaaaggtgggccatgtctg

SEQ ID NO: 1040700 - DNA, 120 bp, Artificial Sequence
  ENSG00000285929_1 (sequence is synthesized)
cttcatgtttccaatcccagcacatgcctggcacacagtagacatggtgccatggaggaatgaagaggccagagcctccctgaggataggttcctggccattctcactcatttccctaag

SEQ ID NO: 1040701 - DNA, 120 bp, Artificial Sequence
  ENSG00000285929_2 (sequence is synthesized)
ggtgggcagattgagatctccgaggatgatttgattccatttcagatcgggatgaagatgatgcagctcctatctatctctgctgttttcgcccacgataccttctcatctttctttgga

SEQ ID NO: 1040702 - DNA, 120 bp, Artificial Sequence
  ENSG00000285929_3 (sequence is synthesized)
gggtccctgacaattttcttctggtggccactgctgagcagctgacacacacagggactgctccatgctgtcaactcttgcttttcgtaagaacttctccctggcacataataggtcagc

SEQ ID NO: 1040703 - DNA, 120 bp, Artificial Sequence
  ENSG00000285929_4 (sequence is synthesized)
agggtgctgatttgactgtggaagcccttctccaggccatgctctgtctctccaaggagaaaatgcagagcatgtttggccctctggtcccagcaagtggcatactgattttaaggtgaa

SEQ ID NO: 1040704 - DNA, 120 bp, Artificial Sequence
  ENSG00000285929_5 (sequence is synthesized)
atttgttatcctggcaaattaagagtacattgggagaatgagcttctcactgaaactggcacataaaatgagaactgcagccccaaatcaatgaaaagatagaaggaagcaacacgctgc

SEQ ID NO: 1040705 - DNA, 120 bp, Artificial Sequence
  ENSG00000285929_6 (sequence is synthesized)
tttaaatgagttttggtctctagacgtagagggactgtaatcgcagactgctaatgggatttgcaaatgtcgtctcagaaccactatctgcaatcctcaagaaacgtgacatgggaggag

SEQ ID NO: 1040706 - DNA, 120 bp, Artificial Sequence
  ENSG00000285929_7 (sequence is synthesized)
tgccaaaggactggagatggataatatgagaggaattttccaaatgtggaagcaataagaatatattgaacactagattgaatttcactcaatctttctctgatgattcagagaacaatt

SEQ ID NO: 1040707 - DNA, 120 bp, Artificial Sequence
  ENSG00000285929_8 (sequence is synthesized)
agaattatgcattgcttcaaggtcattgcaccaaatgaagcttattgcgtactgtaaatgggcagatgttcacattaatgcacaaactgttaacagttaacagctttctgggcaacaggg

SEQ ID NO: 1040708 - DNA, 120 bp, Artificial Sequence
  ENSG00000285929_9 (sequence is synthesized)
aggagcaataagtgttttccttacgtttgcttctttcatcctttctgccaccctgggaggttgcattttgagggcattgaaacttagagagaaggaatcgcttccttctccacagctata

SEQ ID NO: 1040709 - DNA, 120 bp, Artificial Sequence
  ENSG00000285929_10 (sequence is synthesized)
caggtgacatgataagaggcaagacagcagcacaaatgttaacttaatttaaaggtaattgatcttaacctctactctgtgctgcctagaaacatccagactgcattccatgagcgagag

SEQ ID NO: 1040710 - DNA, 120 bp, Artificial Sequence
  ENSG00000285929_11 (sequence is synthesized)
gccaaagagaagccaggaaaggagacagaaaataagcaatcatgagaacaggctcctgagaacagcaatcatgaggctcctgagacattcctcacacatttcacctctagggcacatttc

SEQ ID NO: 1040711 - DNA, 120 bp, Artificial Sequence
  ENSG00000285929_12 (sequence is synthesized)
ccatgttttttcctgcaggataaacacagttttacatgaaaatggcatgagctactttaagtcaaggttcaaaatcacgtcatgtgaagcagatttgatctgatgaatgggaatctaggc

SEQ ID NO: 1040712 - DNA, 120 bp, Artificial Sequence
  ENSG00000285929_13 (sequence is synthesized)
acgttccctgttgatgtagttatggtttcccgtccttacggccaatacacatcctctgagaccagtctattatttatgttttgttcatataaacaaccccccaactttcctgtgttctgc

SEQ ID NO: 1040713 - DNA, 120 bp, Artificial Sequence
  ENSG00000285929_14 (sequence is synthesized)
actaaattacttattttttagtagccatgggccctggtaggaagctaacaaaaccctcaagtcagataattgagggaagcttaatgaaggggctatgcacgaagatccaggcagggttga

SEQ ID NO: 1040714 - DNA, 120 bp, Artificial Sequence
  ENSG00000285929_15 (sequence is synthesized)
ggaaaaccaacagggtgaggatgaagatgccacagctccgcagctcacccgccctagaaggaccaggaccaggagcagaatccagagcttggagaggacagctggaggcaaggctgtctg

SEQ ID NO: 1040715 - DNA, 120 bp, Artificial Sequence
  ENSG00000285929_16 (sequence is synthesized)
ccctgagccaggacctgagcctccccagcagggagtgggctggagaatctgtattccagcctcacttccttcccacctgcagatgctggcagggcctcccaacataagtcacagagcaag

SEQ ID NO: 1040716 - DNA, 120 bp, Artificial Sequence
  ENSG00000285929_17 (sequence is synthesized)
agagcctgatcgttcccaggacacagagcaaagtggaggaagctgcaagatggatctgggagagtgaagagaagataccctagcacaatcccctactcctcccccaaaatgaaattaaaa

SEQ ID NO: 1040717 - DNA, 120 bp, Artificial Sequence
  ENSG00000285925_0 (sequence is synthesized)
tctagttcccagaaaaatcagaacaaggatactgaagcagaaccatttcacagagagcaaagatttgaaggtgggatgacaaatccagttccatcttaactggaagcacaaattgagagt

SEQ ID NO: 1040718 - DNA, 120 bp, Artificial Sequence
  ENSG00000285925_1 (sequence is synthesized)
atgcagctctttatactcacatgggaaaataagacgtagaaatcaaacacttctgctgcacaccaaagggcaattgtctcaaagaaaagcatttgtaccgttgtttcagaagtatagtgg

SEQ ID NO: 1040719 - DNA, 85 bp, Artificial Sequence
  ENSG00000285925_2 (sequence is synthesized)
aaagaaaagcatttgtaccgttgtttcagaagtatagtgggccgcagtggctcacatctgtaatcccaacattttgggaggacaa

SEQ ID NO: 1040720 - DNA, 90 bp, Artificial Sequence
  ENSG00000285925_3 (sequence is synthesized)
tacaaaaattagctgggaatggtggcaggtgcctgtagtcacagctactccagagaaacagagtttgcagtgagcagagatcacaccact

SEQ ID NO: 1040721 - DNA, 120 bp, Artificial Sequence
  ENSG00000285925_4 (sequence is synthesized)
gcactccagcctgtgtgacagagagagacagtctcaaaaaaagaaaaagagagagagagagaagcatagtgaacttgctacttttttcatgaaattccaatttaattgaaagaacaatga

SEQ ID NO: 1040722 - DNA, 120 bp, Artificial Sequence
  ENSG00000285925_5 (sequence is synthesized)
ctgataaattatgattattcagacttggatatttggcagacatttgaagatgaataaagtgcgcctatcccttgaaggaaaataactgacactgtttgttgccagtgataaaactggatc

SEQ ID NO: 1040723 - DNA, 120 bp, Artificial Sequence
  ENSG00000285925_6 (sequence is synthesized)
tttgcagtaaaaattggaattttggataacttgtatctgctaccataagcttgatagtttcctgatatgcaacaacttttatgacaaaattggtgattttaacaaatgtgattatttatt

SEQ ID NO: 1040724 - DNA, 120 bp, Artificial Sequence
  ENSG00000285926_0 (sequence is synthesized)
gggcagagggcgcagccagtccggggccccctagctcatctccccatctcacccgccggcctggagggccgtgggggagcgcgccgcgctctgcgtctcttcgagctctttctgccgggc

SEQ ID NO: 1040725 - DNA, 120 bp, Artificial Sequence
  ENSG00000285926_1 (sequence is synthesized)
cggaatgcaggagtcacaaattgattcaaataggtttacaaatttaaaaaagaagcttgacaaccacttaacctgttaaaggatactacaggagtggcagagaattcctcaattcttctg

SEQ ID NO: 1040726 - DNA, 120 bp, Artificial Sequence
  ENSG00000285926_2 (sequence is synthesized)
cttctgtgctgccagggctaaaagctgcttgcattgtaaataaccaggaaaaaggaacagatttccaggtggttgatgatgtgtggttgagaaaagagcctcaagaagttccagaggtgg

SEQ ID NO: 1040727 - DNA, 120 bp, Artificial Sequence
  ENSG00000285926_3 (sequence is synthesized)
gatgctgcttgaggctgacagagaagtggatatgctgctatttccaaaagtgtcactggatggcttagaaaaagcagtgtgagaatgtgagcccggactaccaaaaccagccacagaact

SEQ ID NO: 1040728 - DNA, 120 bp, Artificial Sequence
  ENSG00000285926_4 (sequence is synthesized)
gccacctccaaaggctggggccactggagctctgacaggacctgttgccaaggaagctggaagtcctgaaaatccaggtgatccaaaactggaagctgcagggcttttgaatgaaaatga

SEQ ID NO: 1040729 - DNA, 120 bp, Artificial Sequence
  ENSG00000285926_5 (sequence is synthesized)
tgcagccgatgtgacttcaggcttcccaaatccaaaagctggagcagaagtagagatacctgaactggtagaggctgcagctccaaatgctggggaactcccaaaaccagcagggcttcc

SEQ ID NO: 1040730 - DNA, 120 bp, Artificial Sequence
  ENSG00000285926_6 (sequence is synthesized)
agaagaggcagcagcaaatccagagtttgttttaaaactaaagttctgagcattatcactgctgctgttattgactggaaagcctacaaacaacaacaacaacaaaaaaaacaacaaaaa

SEQ ID NO: 1040731 - DNA, 120 bp, Artificial Sequence
  ENSG00000285921_0 (sequence is synthesized)
gacggggctccatggctgggtgcgggttgttaataaaacttcgactgagatcctgaggcttttgctgcatgaggacatctaggtgcccaccctgggctgaggggccggccttgtacatgt

SEQ ID NO: 1040732 - DNA, 120 bp, Artificial Sequence
  ENSG00000285921_1 (sequence is synthesized)
agttagccattactttcgactggccgctgccgccagctaccccaggcatgggggagctctgtgggctgaatgtctgctgaccaaaagaagggctggggattttctcctgcccaaatggac

SEQ ID NO: 1040733 - DNA, 120 bp, Artificial Sequence
  ENSG00000285921_2 (sequence is synthesized)
ctggtgatggtccagcagaagagggcaaggctgaccagttggtaggctggtgctgctgctggtgctgctgcatccgggcatgctgctgacgattagcagctatctgtttgagctgctggg

SEQ ID NO: 1040734 - DNA, 120 bp, Artificial Sequence
  ENSG00000285921_3 (sequence is synthesized)
ctggctctgagggactgaagggattggagacgaagtggagagggcagagttggccatggagaatgcggggccagctgatgggggcctcagctgaggagagcctgaggggccctgagtcaa

SEQ ID NO: 1040735 - DNA, 120 bp, Artificial Sequence
  ENSG00000285921_4 (sequence is synthesized)
gcccgcaagatggcaccttacaagatgccagccccttggacttcccagtctccaaaacttgtcgtcaattttccatgagttcaggcaggccaccaaacagatctcaaatacacagaaaac

SEQ ID NO: 1040736 - DNA, 120 bp, Artificial Sequence
  ENSG00000285921_5 (sequence is synthesized)
tatggaaaaagaataacaagtatggtattgtccacaaactcattgaccattcagtctccattttaatatactacacatacactgtgtgagtgtgtctgaaagacggtgggcaggggagac

SEQ ID NO: 1040737 - DNA, 120 bp, Artificial Sequence
  ENSG00000285921_6 (sequence is synthesized)
ggggagacagaagaaactgtgggtgtttatggttaatattaatcacttggataatgaatattattattagaaaattagaattttataattgcattaaacctgaaaattattaaatatatt

SEQ ID NO: 1040738 - DNA, 120 bp, Artificial Sequence
  ENSG00000285922_0 (sequence is synthesized)
gggggccccttttggctccttcagacctcagcccagagaaccagagaagggtcagagacgcacgagggagaggctgaactcacacttacctttgaccagtagaagaggtggtggttgatt

SEQ ID NO: 1040739 - DNA, 120 bp, Artificial Sequence
  ENSG00000285922_1 (sequence is synthesized)
ttttcgctctcctactctcccagaggaggccccggtccgagccagcgctggcgggctgcggctgctgaaactagagttcctgtggccagaatggtgccccttgcccgctccagggcttca

SEQ ID NO: 1040740 - DNA, 120 bp, Artificial Sequence
  ENSG00000285922_2 (sequence is synthesized)
gagaagagcgagcccggcccggggctagggtgtccggcctgccccgcgaaggcgcgctgggcctggagactttgcgctcttcacttcgccagacgagagtttagcccggggcccgtccgc

SEQ ID NO: 1040741 - DNA, 120 bp, Artificial Sequence
  ENSG00000285922_3 (sequence is synthesized)
gacacctggcctccggcggttttcgggaccctctctcaaaactgcgcgagcgccgagatcactctggtattagctccctttagatgaggaaggcattgtatctttctaagggggtctctc

SEQ ID NO: 1040742 - DNA, 120 bp, Artificial Sequence
  ENSG00000285922_4 (sequence is synthesized)
agacctaagttattttggtctgcagtggtagtaatggccttgaatttgtttaaacttactgcccacgacaccctctccccaaatccccctacacccacacagtacgctccatcacggcca

SEQ ID NO: 1040743 - DNA, 120 bp, Artificial Sequence
  ENSG00000285922_5 (sequence is synthesized)
ccaccactcccactccatttgcatttgaaaacctctggaaacataagcgctttcaggatgaactctctctctctctctcactctctctctctctcactgtctctctctctctctctctct

SEQ ID NO: 1040744 - DNA, 120 bp, Artificial Sequence
  ENSG00000285922_6 (sequence is synthesized)
cacacacacacacacacacacagcccgccaagtggaaactgagttgagtcataggatgcatatgaataggattggatggtcctttgcttctgcggataagaatgtttaataacccaggat

SEQ ID NO: 1040745 - DNA, 120 bp, Artificial Sequence
  ENSG00000285922_7 (sequence is synthesized)
gaagtaggactatgtttttcaaggcacttgcaagcaatctgctacatcgtttatgggagaacttaaaaatattccccttgattaagactcacaggtcaaatatcatctctcttttctgca

SEQ ID NO: 1040746 - DNA, 120 bp, Artificial Sequence
  ENSG00000285922_8 (sequence is synthesized)
tgctaattaaaagcaactctgttcttaggtatttgacagtcatttgaatcaagatacttgaaaatttctgactcaatagcaatgtgcttcagtacacacaatcaagtataatcatatata

SEQ ID NO: 1040747 - DNA, 120 bp, Artificial Sequence
  ENSG00000285922_9 (sequence is synthesized)
tgtgagatatgactttgaagaggagatgacttttttaaaaaaaagacgcatactcaaagacaactagaaatggctgctgcaggcaaccagtcactgctctgactacaacatatttgtgca

SEQ ID NO: 1040748 - DNA, 120 bp, Artificial Sequence
  ENSG00000285922_10 (sequence is synthesized)
attaatagtctcacaacctagtccaaatcccctctttacttggagcaggagtgttaatgaactgtagatgcaaagctcttaatgtatagatgtagtgtcctcttgaaatttaacaagctt

SEQ ID NO: 1040749 - DNA, 120 bp, Artificial Sequence
  ENSG00000285922_11 (sequence is synthesized)
tgaaaatgtaataaaacagagataagtattcaggttatttttagtttgtgttggcttgttgtgtttttaatattgtttaaaatatgacacagttatcctcagttcctatcccatatgtcc

SEQ ID NO: 1040750 - DNA, 120 bp, Artificial Sequence
  ENSG00000285922_12 (sequence is synthesized)
attctggaggatccagaaaacatatcagtagttagggtaacaaaaaatcctccaaaaaagacccaagttttgccagtaaactttaagtctttattgagcatttcataatagctttaaaaa

SEQ ID NO: 1040751 - DNA, 120 bp, Artificial Sequence
  ENSG00000285922_13 (sequence is synthesized)
aacaaagtgcggttcatgtttctagctactttcatacaatgttgaaataatactataatttgactaggtaagattcttattgattgctaatttggtgttagaattgattatatttcacat

SEQ ID NO: 1040752 - DNA, 120 bp, Artificial Sequence
  ENSG00000285923_0 (sequence is synthesized)
ggccagcggaaggcggcaagaggagcagcaaggctccacgcgaggcggccggcggctggagtcccagtcagcctccgctttcatcccagagcagtccacgggggccttaaaggaatgtag

SEQ ID NO: 1040753 - DNA, 120 bp, Artificial Sequence
  ENSG00000285923_1 (sequence is synthesized)
gctgggtgaagttggcccagtgacacctgcgttcagaaaaacgttctttccgctcccaacgccccctctccaccgccacccgacccccgaaatagttttccccgagtgttgtggatagaa

SEQ ID NO: 1040754 - DNA, 120 bp, Artificial Sequence
  ENSG00000285923_2 (sequence is synthesized)
ctgttgatctcttggaaaagttattgtatcctgccatccttccctctggagactccacttaatatatataaagtttcaggaaaatcaacctttaaaaggagtgaaattctgacatttgct

SEQ ID NO: 1040755 - DNA, 120 bp, Artificial Sequence
  ENSG00000285923_3 (sequence is synthesized)
taagcttcaggccccacaaaacctggatctgccctgccaggatcagcatctagaggaaaactactacttccacaatagcacaaccaatctgatcatccctgcatcagtgagcattctcca

SEQ ID NO: 1040756 - DNA, 120 bp, Artificial Sequence
  ENSG00000285923_4 (sequence is synthesized)
gagaaacagagccaacaggatatgtgtatatatgtgaagaaagacttattttaaggagttggctcatgcaattatggaggtgcaagtccaaaatctgtagggcaggcagatgggcagact

SEQ ID NO: 1040757 - DNA, 120 bp, Artificial Sequence
  ENSG00000285923_5 (sequence is synthesized)
ggagacccagagaagagttgcagttcaagtccaaagtcggttggaagaattccctcttgctgggtaacactggggaagcaggagtagatggaaaggggaggtgtcaggctttgctctacc

SEQ ID NO: 1040758 - DNA, 120 bp, Artificial Sequence
  ENSG00000285923_6 (sequence is synthesized)
aaggacttcaactgattggatgaggcccagtaacattatggagggaaacctgctttgctcagagtttactgatttaaatattaatctcatccacaaaaaaataaataaccttcacagaaa

SEQ ID NO: 1040759 - DNA, 120 bp, Artificial Sequence
  ENSG00000249547_0 (sequence is synthesized)
aatgcatttttggagatccacaccaatttattctgtactcagcctatagaatgtaaaataagatcttaaatatagccaggaaaaagccaaacttcctcagagaaatgaatattctattga

SEQ ID NO: 1040760 - DNA, 120 bp, Artificial Sequence
  ENSG00000249547_1 (sequence is synthesized)
ttccaagggcagaaatggttcatcatataaggatcaatgatcataatgagctgtgaaggtcaaacttggccaaccatagcgggatgtgcattaaaaagatcagaatgctttgacgcagcg

SEQ ID NO: 1040761 - DNA, 120 bp, Artificial Sequence
  ENSG00000249547_2 (sequence is synthesized)
cttccctgcatgagcctttcttcctttgctctgtgaaatgagggcactagagaaggtggtcccttatgtaccagtgtgggctaaaggtctactggtacttataataggaaaaagaaagaa

SEQ ID NO: 1040762 - DNA, 120 bp, Artificial Sequence
  ENSG00000249547_3 (sequence is synthesized)
ggcagagatcctgttctgacatttaagaatgaacaagaagcccagaagtttcccagaatgggaaagagaaatttgattaaagacaggatgcatcattgaaggcaaagtaactgtgcctct

SEQ ID NO: 1040763 - DNA, 120 bp, Artificial Sequence
  ENSG00000249545_0 (sequence is synthesized)
aaagttctaatcaaacaattttcctactctccaggttaagaggccttcatctggcctctttatggacatggggatttcagaatttatactgacaagtaacttgtgccccccatgatttct

SEQ ID NO: 1040764 - DNA, 120 bp, Artificial Sequence
  ENSG00000249545_1 (sequence is synthesized)
accattgtatgttggatgtgtatagggagactgtaggcagattcttagttccgagggctacaaggaaccacattcagacctgacagagaatatccttttattcagagatcctgaacttag

SEQ ID NO: 1040765 - DNA, 120 bp, Artificial Sequence
  ENSG00000249545_2 (sequence is synthesized)
agagtgaatgtcttctatatgcaggaagagtgaaacatatttggtgaccagaggtagagtatagccaagaatgctactgcttggcaatatgagctatagcttccggcctcctttaaaatt

SEQ ID NO: 1040766 - DNA, 120 bp, Artificial Sequence
  ENSG00000249545_3 (sequence is synthesized)
aggagtggtcaattggctgcattctggtcaactgaatataaatgcaaaaggtttaaaggaaatgattacagttgccaccatctccttgattattaattaaaggcttttcttcaattatca

SEQ ID NO: 1040767 - DNA, 120 bp, Artificial Sequence
  ENSG00000205740_0 (sequence is synthesized)
gcacagcgcacccgcccggcttggaggtcagccacggagggcgtgtgagggcctcaggagcgagggtacagaggagaggacgcccgggttttagggggagcgcggagactaaattcctgc

SEQ ID NO: 1040768 - DNA, 120 bp, Artificial Sequence
  ENSG00000205740_1 (sequence is synthesized)
tgagtaaagcgggggtttccgacagactgccctgcgggtttctggagcgggttcaggcccccagccacgcgccctgggccagggttggagggtccggggtcttgggatttgggagttgcg

SEQ ID NO: 1040769 - DNA, 120 bp, Artificial Sequence
  ENSG00000205740_2 (sequence is synthesized)
gggcttaggagtccagagggtctaggggatccgggagtctgggggtcctgggtcgcggcgagccccgcaaaggaggaggaagccgcgcgtgcggggcgtgcccagcctctgggtgtggag

SEQ ID NO: 1040770 - DNA, 120 bp, Artificial Sequence
  ENSG00000205740_3 (sequence is synthesized)
cagatgacgcccctaccccggcctcgcgcgtgggacttgatcccgggccgtggtgaggaggccctcgcggcttccctgcagccctgctttctcgtgcttgttaaatcccaaaacgggcgg

SEQ ID NO: 1040771 - DNA, 120 bp, Artificial Sequence
  ENSG00000205740_4 (sequence is synthesized)
agaagggaaagcctgatctaaggcaaaagaggtgcagctggttccgcgcagtgccttaggagagcccagggaacagttgcgagagacagtcctgtggggtccaactgaggagaaggttga

SEQ ID NO: 1040772 - DNA, 120 bp, Artificial Sequence
  ENSG00000205740_5 (sequence is synthesized)
tgaggatggagcctttactgcttttatgtttgtgaatagagtggccgctccctttgggaacccagggccacatcccttaaattaaacgttaggtagggctgactcagtcaagcagtgttc

SEQ ID NO: 1040773 - DNA, 120 bp, Artificial Sequence
  ENSG00000205740_6 (sequence is synthesized)
agagctgctgactatatattaactcgtttaatttctgcaacagcctcatgaagtgcatggggaaacaaaggcacacaaggctcgaaagcaccccgtggttgtgcagctgacaagctaaca

SEQ ID NO: 1040774 - DNA, 120 bp, Artificial Sequence
  ENSG00000205740_7 (sequence is synthesized)
ggcagcagaggtgggctttgaacccaggcagcctggctccagcaaacctgcttctaaccattagctatactgcttctcacgcatctgggatgccccccactctccaatccttttaaacaa

SEQ ID NO: 1040775 - DNA, 120 bp, Artificial Sequence
  ENSG00000205740_8 (sequence is synthesized)
gtcctattattcttacgcgaaaatacctctcataaattcccagcattccaatattgaaaatcattctgggtcatgcttttctcatctattaactatgcttccatttttgtgtcacaaggc

SEQ ID NO: 1040776 - DNA, 120 bp, Artificial Sequence
  ENSG00000205740_9 (sequence is synthesized)
ggataagcatacctcctacatctttgtggcacttctaaaggaagcttctagggtaattaggatttgctggctatgatcatttgctaaaccacaggacagttctggccaccatttccgaga

SEQ ID NO: 1040777 - DNA, 120 bp, Artificial Sequence
  ENSG00000205740_10 (sequence is synthesized)
ttagcaaagctatgctcatacttattgccctttcttttaggttcttgtatgtttcctcaacctctcccactttctctcactctgatatagccagttcctctttttcttgtaatccggtat

SEQ ID NO: 1040778 - DNA, 120 bp, Artificial Sequence
  ENSG00000205740_11 (sequence is synthesized)
tctgatatagccagttcctctttttcttgtaatccggtatttagataagtccagtcaatactttgcttcagatgggcaaacatcctttctttaattttttttttttttttgagacggaat

SEQ ID NO: 1040779 - DNA, 78 bp, Artificial Sequence
  ENSG00000205740_12 (sequence is synthesized)
gctggtctcaaacagagattacaggcatgagccacctgcttttaacttgttcagctacaaaggcatgtctgtgaatgc

SEQ ID NO: 1040780 - DNA, 120 bp, Artificial Sequence
  ENSG00000205740_13 (sequence is synthesized)
cttttaacttgttcagctacaaaggcatgtctgtgaatgcacaaccataatgactcatcatgggcccagagctataacaatgataaggtaccaagcatcttacaccatgtgcgtgttgat

SEQ ID NO: 1040781 - DNA, 120 bp, Artificial Sequence
  ENSG00000205740_14 (sequence is synthesized)
gagaatcaacatccttgcctgttcttgtgattttgtggcagagtatagcttcttgggggcaagtatgtattctacaccactaggagcaagcttctttatcatacacttctgggcttctct

SEQ ID NO: 1040782 - DNA, 120 bp, Artificial Sequence
  ENSG00000205740_15 (sequence is synthesized)
ggggaagccaaactctaaaggccttttctgaggagtgtcgcaaatgctgcctgcagtacgaggcacattgccagttcctgactgcattagcaggttccagctgccaggacgcctctgagt

SEQ ID NO: 1040783 - DNA, 120 bp, Artificial Sequence
  ENSG00000205740_16 (sequence is synthesized)
gtgtaccttgtgacagaaaggtacttctcagctgtagtaaaggatgctctcaagggtactctgcaaagcttctgactgcgaggcacttctcagtaaaaagctttgtttttcagacctttt

SEQ ID NO: 1040784 - DNA, 120 bp, Artificial Sequence
  ENSG00000205740_17 (sequence is synthesized)
tattttgtgggtttggtcttttctgttttaccttctcgttgctgtaattctgatggatgaaaggtacattttgcagaactgaacttcctgcctgaaaggagcctttacatggggattagc

SEQ ID NO: 1040785 - DNA, 120 bp, Artificial Sequence
  ENSG00000205740_18 (sequence is synthesized)
catcagtaggcatccggtcttagagggtcctatgagtgctccattgggcccgtcggccacttccctggatccccacaggaactcattcagaacgagtcacatgctgctttgtacctagat

SEQ ID NO: 1040786 - DNA, 120 bp, Artificial Sequence
  ENSG00000205740_19 (sequence is synthesized)
gcttccttgtgtacatcttgtttccaaaagaagtagccagctcttcgtggacaggaactgtgtcttacttttttgccatccctcacctcaggcagcactgccaagagcattcacagtgac

SEQ ID NO: 1040787 - DNA, 120 bp, Artificial Sequence
  ENSG00000205740_20 (sequence is synthesized)
tgtggaactccgttgattgaatgttggcttgagtaagttcctgatgtaggggctgtagcggttggaatcaagcttctgcaatactcaagtagtcctactgaattacagtactgtcagacc

SEQ ID NO: 1040788 - DNA, 120 bp, Artificial Sequence
  ENSG00000205740_21 (sequence is synthesized)
ccctctgcacaaccctgaagtgggtcagaactccacactgtgccataaagaggaaagctgtcaacagggaggtctaaggaaacacctccttaggtggaaggcagcaatggcatgagagcc

SEQ ID NO: 1040789 - DNA, 120 bp, Artificial Sequence
  ENSG00000205740_22 (sequence is synthesized)
accctccgggccaaaggtgcagcctgacattctctgcagaattacacagtgagttaagactgtgagcttcatttctgagatacagctccacccgctgtgatcctgggaaaatgtctcagc

SEQ ID NO: 1040790 - DNA, 120 bp, Artificial Sequence
  ENSG00000205740_23 (sequence is synthesized)
ttccccaagcctctgtttcttcactctttgctcacttactatctaccaggcatgttaaaaatactttatgtgaattattttagcttttcactaaccctattctacaggcattaataagtg

SEQ ID NO: 1040791 - DNA, 120 bp, Artificial Sequence
  ENSG00000205740_24 (sequence is synthesized)
agcaaagagattgtgtattattaattatgcattatgtattatctatgttcttattagctgcttagttacaataatatttgctaaacttttgttctattcattaaattatcgttgaacctt

SEQ ID NO: 1040792 - DNA, 120 bp, Artificial Sequence
  ENSG00000205740_25 (sequence is synthesized)
gctttccgcgtcgcacagcgcacccgcccggcttggagaatcacagtggtaacgcctactgcacggggaggaactgagcatggtttcagtagcttagctgatgcgtctccagaaaactcg

SEQ ID NO: 1040793 - DNA, 120 bp, Artificial Sequence
  ENSG00000205740_26 (sequence is synthesized)
atgtggctcagcagcgagccctccaaacaaacaacagacagaactgccagcattctctgtaatgccaagacctgctgggcagcatgtgtggccttggagaggggaaagaatgcggctacc

SEQ ID NO: 1040794 - DNA, 120 bp, Artificial Sequence
  ENSG00000205740_27 (sequence is synthesized)
tggggctgcatcttctttattttctaactacttttctctgccttatgtcatttacttgtcaatatcagatctcaatgtagaatgcctgatattctcagtgtttgattctcagcaagtgca

SEQ ID NO: 1040795 - DNA, 120 bp, Artificial Sequence
  ENSG00000205740_28 (sequence is synthesized)
tacttcataccagtcaaacggcttacatagaaatggaatgtttcatgattgcttggaagtctctaaacacccctttcttggtctaactctgacgctgtggctgtgtgatctgtcttcctc

SEQ ID NO: 1040796 - DNA, 120 bp, Artificial Sequence
  ENSG00000205740_29 (sequence is synthesized)
tggcttctacatgagtggacatgaacccctttggaacctgtcacccctctgagaatagaatgagagctgtggactgtcctgccacaattccacagactgggtaatacataaggaatagaa

SEQ ID NO: 1040797 - DNA, 120 bp, Artificial Sequence
  ENSG00000205740_30 (sequence is synthesized)
gtttttttggctcatgtttctggaggctgggaagtccaagagcatggtgccagcatctggtgagggccttcccctggtggaagtgggtgcaagagacagagagaggctgggtgcggttgc

SEQ ID NO: 1040798 - DNA, 120 bp, Artificial Sequence
  ENSG00000205740_31 (sequence is synthesized)
cagtgagctgagattgcactactgcactactccagcctgggcaacaattgcaaaactccgtctcaaaaaaaaaataaagagagagagagaggaatgggaatgaacttatcaggagccacc

SEQ ID NO: 1040799 - DNA, 120 bp, Artificial Sequence
  ENSG00000205740_32 (sequence is synthesized)
tccctcgacaacgaatccactcccgacacaaaagcatattccatccacaggggcaaagcctcaggcctaatctcagaaaggccccaacacggttacaagagcaactcagcttccagcacg

SEQ ID NO: 1040800 - DNA, 120 bp, Artificial Sequence
  ENSG00000205740_33 (sequence is synthesized)
tgaactccggggcactagcagactccgcgctcagaacattggcacttctcatttgaactctatcttcacacaccctgcgtgaactgggaagcgccctcagcaaatagactcatgtggcta

SEQ ID NO: 1040801 - DNA, 120 bp, Artificial Sequence
  ENSG00000205740_34 (sequence is synthesized)
cactaagcttgttcactttgcctcccgccttgcaagggttttgcccttccagtttctgtcagcttctgggtgatctctagtgccttcaaactgttgttttaatatctaatacagaagcta

SEQ ID NO: 1040802 - DNA, 120 bp, Artificial Sequence
  ENSG00000205740_35 (sequence is synthesized)
tcatcgttattagcaggagagttcctccagtacaggcaactctgccgtggccgaaaacagattatgcaaaacaatttcaccctgtggatgtacatgcagattatggactgatacataatc

SEQ ID NO: 1040803 - DNA, 120 bp, Artificial Sequence
  ENSG00000205740_36 (sequence is synthesized)
aaaatcagaaatctttacaaattgaggaaaatgttttttcctactattgttataaaatagtttgggccacttctacttcctagtatccctggattacgtaacagtaacagctgcgattca

SEQ ID NO: 1040804 - DNA, 120 bp, Artificial Sequence
  ENSG00000205740_37 (sequence is synthesized)
gttccacattctacatgtaaggagcgaggggtgggagcccagccttcctgccttgcatctcccctgtccttgtgcttcatctcagcagcattacgtcatacttgctaataattcacctaa

SEQ ID NO: 1040805 - DNA, 120 bp, Artificial Sequence
  ENSG00000205740_38 (sequence is synthesized)
gagtgacaaaaataatttttataagcatgtcacaaaaaggaaggaaaagtttcttttccctgctttgatattagaaccaaatggagctctggaagttttcaataaaatgaaaaatgattt

SEQ ID NO: 1040806 - DNA, 120 bp, Artificial Sequence
  ENSG00000281207_0 (sequence is synthesized)
aactgaagtgtgttctgtggaacactagtcctgtgaaatgccctgttcaacaaggtttggtgattttctggtggctcagaccccaaatttaggagtatccttaattgtctcaccagcagg

SEQ ID NO: 1040807 - DNA, 120 bp, Artificial Sequence
  ENSG00000281207_1 (sequence is synthesized)
tatttattgggtgtctaccatatgccagccatacccaaacccctgtcccccagagcagttattcagtgggggaagcaccaaatataagctacagagtgtggtagttcatagatggagacc

SEQ ID NO: 1040808 - DNA, 120 bp, Artificial Sequence
  ENSG00000281207_2 (sequence is synthesized)
aggggtggaagtgagcaggggagtggcagtgctgggaggtggtgtctttaaaatagggtgggtgggaaattaagcatggacttgaaggtgaagaggaaaggaaataggccgctatgtagc

SEQ ID NO: 1040809 - DNA, 120 bp, Artificial Sequence
  ENSG00000281207_3 (sequence is synthesized)
gcagaggccccgaggcaggagtgcaaatgaaacaagttggtgggcgtggctgaagtggcttacataaggggcggaagacattgaggttgggtgggctaggtggtggagaaccatgtaggc

SEQ ID NO: 1040810 - DNA, 120 bp, Artificial Sequence
  ENSG00000281207_4 (sequence is synthesized)
catcaagtttgggctttgctcttgaagaatttggagggctatgggtgcaggtgtggcgtgagtgtgatcagactctggctttgcagcctctggctcagctggtggagacagcaggagaaa

SEQ ID NO: 1040811 - DNA, 120 bp, Artificial Sequence
  ENSG00000281207_5 (sequence is synthesized)
cggccagaggcaggaagcagctggaggagtctggttttttttgtttgttttaagctaacggtcttactggaccagaggggtcttggaaaggaactgagacccttagtgtgaggtgctgct

SEQ ID NO: 1040812 - DNA, 120 bp, Artificial Sequence
  ENSG00000281207_6 (sequence is synthesized)
ctgtgccacagctggcgtagacacagggcactggcccgatggtgacaaaatgcccctggccattgtcactgtcttatagatgaagaaactgaagcacagaggcatagcactttgccccac

SEQ ID NO: 1040813 - DNA, 120 bp, Artificial Sequence
  ENSG00000281207_7 (sequence is synthesized)
ggtccctggtctttaagacagagctggactggagtctgaggggctgggctccctgcccttgcaggtctgtcctctgcctcctggacagaggtgggctgggcctgggactcatgaccctgc

SEQ ID NO: 1040814 - DNA, 120 bp, Artificial Sequence
  ENSG00000281207_8 (sequence is synthesized)
agcatctgaccggctgacccagtgtcctagaaagaaccattcttgtcccaggtgcatgtaatttattaatggagctttgacagtcacaagttccagcaagtcaggggtgggggctgcagg

SEQ ID NO: 1040815 - DNA, 120 bp, Artificial Sequence
  ENSG00000281207_9 (sequence is synthesized)
gtggcctcttgccctgtaaccacagtcatcaaatatgcctcgccatctttgaggggctttcctgagatgacagattcctttctggcactgtgtagccaactggagtcacagacctcagcc

SEQ ID NO: 1040816 - DNA, 120 bp, Artificial Sequence
  ENSG00000281207_10 (sequence is synthesized)
tgggccaaatgagcattttagggagaaggacaatcccttatagcttagccctaggggagctctgggcagggttttacacattctttctgaaagtaaggtcatttggggacagggctgaga

SEQ ID NO: 1040817 - DNA, 120 bp, Artificial Sequence
  ENSG00000281207_11 (sequence is synthesized)
gcagtttcttggctacacagatgggtctgtcagggttgaagccacatgggtgcctgctcatgtgccatgttgaaggagtccctgtccgcctctcagcagcccgcatgggctttactggtt

SEQ ID NO: 1040818 - DNA, 120 bp, Artificial Sequence
  ENSG00000281207_12 (sequence is synthesized)
ggccttacactcaaacaggaaatccctgggtctcaggtggagagtgccgtgccgtcctgcctgctccccagggccctcacaggacacagcaggtgcaggacacaggcccgtgctgctgca

SEQ ID NO: 1040819 - DNA, 120 bp, Artificial Sequence
  ENSG00000281207_13 (sequence is synthesized)
gctgctgctggagctgctccttctccatcatcagcgccttcatcttctcttccagcttgcccagctccaccagccacctctgaggggacatgggaaaagcatgtggccaagcccgcctgg

SEQ ID NO: 1040820 - DNA, 120 bp, Artificial Sequence
  ENSG00000281207_14 (sequence is synthesized)
tctcgggcctgtccgtcctccacctggggccaaactgagggaggaaggcaaagcccaggagcctgagagctttctcagctaggggaaaagtcaggcccctcggcctgctgccaccttcaa

SEQ ID NO: 1040821 - DNA, 120 bp, Artificial Sequence
  ENSG00000281207_15 (sequence is synthesized)
ccgtgtcagcctgagggaagctgccggctgccagccatggaagggagcctcctccgtgctgggcaggccatgtgcctcctcactgttggtcccttgtcctccattctctgtttccctctt

SEQ ID NO: 1040822 - DNA, 120 bp, Artificial Sequence
  ENSG00000281207_16 (sequence is synthesized)
gaaaaagctcttccttgggactgtgtcttgccccctctgccgctttagggcctcccctaaaatgcagtgtatagtctttggggttttctggtgacatctcaacattccagtctctctgct

SEQ ID NO: 1040823 - DNA, 120 bp, Artificial Sequence
  ENSG00000281207_17 (sequence is synthesized)
tctctgctccctcactcaagatcgagtgtgttaactgcccaagtagagggtgaggggtttcaggcacccctgaagggaggatactgcataggatttttttttttttgagatggagtctcg

SEQ ID NO: 1040824 - DNA, 65 bp, Artificial Sequence
  ENSG00000281207_18 (sequence is synthesized)
attcgatcgattctcctgcctcaccctctcgagtatttggaactacaggcgcccgccaccatgcc

SEQ ID NO: 1040825 - DNA, 120 bp, Artificial Sequence
  ENSG00000281207_19 (sequence is synthesized)
gagccactgcgcctggccactgcatagatttttaaaaggagagagcttgggcctcttccttcccaccagccacctacccgcggagtatgggatgtggtgtgattgtattccaaccccttg

SEQ ID NO: 1040826 - DNA, 120 bp, Artificial Sequence
  ENSG00000281207_20 (sequence is synthesized)
ggttcaacggggtgatgcaggacccagggaaccatggtggcttgccctgggctgctcagtgggtggctgaaggggtctggggtcagctccgctccaccccacccactggcctcagcttcc

SEQ ID NO: 1040827 - DNA, 120 bp, Artificial Sequence
  ENSG00000281207_21 (sequence is synthesized)
gtacctgcctgcaccactcctggatggcgctggcagacagcgggccctggatgctcccgtcgcgccgcagaaacacctccccctggtctgtctggtagagttgcggctggctctgggcct

SEQ ID NO: 1040828 - DNA, 120 bp, Artificial Sequence
  ENSG00000281207_22 (sequence is synthesized)
tgggggtgtgcacggtcaggcggatcaccttggtaggggcaacagcagctctggaggcgccgcccctcacggtcggcagcccccatcctgccaggctgctcagcattgctcactgattcc

SEQ ID NO: 1040829 - DNA, 120 bp, Artificial Sequence
  ENSG00000281207_23 (sequence is synthesized)
ttagggcaggccagcagggctggcacaggggccatccccagcctcttctcctgtggcccccagtcccgtccctgccccagcactgcctggcaggagtgcaggccatcgtcttactgagtg

SEQ ID NO: 1040830 - DNA, 120 bp, Artificial Sequence
  ENSG00000281207_24 (sequence is synthesized)
atgacagatgacaggcccagaggccctcctgtcctgcaggctcaccttgagggggacgctggtctccgaggtactgatcacagggatgaaggtgagagtgtaggcatcgggaaagatctg

SEQ ID NO: 1040831 - DNA, 120 bp, Artificial Sequence
  ENSG00000281207_25 (sequence is synthesized)
aggcttgaagccctgcaggatggagtccaccagcaggcgtgcgcggtcctcgtcacggtggctgcagcggatgccctgcaccaggccgctgtcctctactcccacgagcaggctgccgcc

SEQ ID NO: 1040832 - DNA, 120 bp, Artificial Sequence
  ENSG00000281207_26 (sequence is synthesized)
ctcgctgttgaggaaggcgcacacgtagcgccgcacgtggtgcttgaaggccaggctgaggtactcgccgctaccccgcttgaactccatattgcgggtctcgctgcccaggaaggcacc

SEQ ID NO: 1040833 - DNA, 120 bp, Artificial Sequence
  ENSG00000281207_27 (sequence is synthesized)
ctggaagagctggtccttgcccacgatctgctggtgcacaatggcactgtcggagcacacgccgctgggccggccctggcagctctgcagctgctgggcctggggcctatcaggcagcgt

SEQ ID NO: 1040834 - DNA, 120 bp, Artificial Sequence
  ENSG00000281207_28 (sequence is synthesized)
gtgtgtaggccaggtgggcagcgggacaccagagcctggactggggccagggctcaggccactgtcctcctcctcctcctccttctcctagggtggtagtcaagaatgaatgtatgggtc

SEQ ID NO: 1040835 - DNA, 120 bp, Artificial Sequence
  ENSG00000281207_29 (sequence is synthesized)
cagccaggaaatgggagccctgaccctgagaaggactgcaagaacccccagtcaggcccctgctgcagcctgactcttacggacatcctgatgcccctcaccaggccgaggggcccagtt

SEQ ID NO: 1040836 - DNA, 120 bp, Artificial Sequence
  ENSG00000281207_30 (sequence is synthesized)
ctgcccaccctcctgcagccgaggcaggaaaccctgctggatcgagggttccagtcagcgctcctttccctgccaagctgggcccttcccaggtgaggctctccacacaggttcctactg

SEQ ID NO: 1040837 - DNA, 120 bp, Artificial Sequence
  ENSG00000281207_31 (sequence is synthesized)
agaggtcaggcagcagcacctacgtgtttgcgaaacaggtcagcgtggggtccaagctgaggatcagcttcccggacaaactgcatcacatcctcgactgtccatgaggaggggtcccgg

SEQ ID NO: 1040838 - DNA, 120 bp, Artificial Sequence
  ENSG00000281207_32 (sequence is synthesized)
catcctcgactgtccatgaggaggggtcccggccactcagtcgagaggcatcgcggctctccagaaacacttcaaggaagctggggttgatgagcgacggagtctcactctgttgctcag

SEQ ID NO: 1040839 - DNA, 80 bp, Artificial Sequence
  ENSG00000281207_33 (sequence is synthesized)
tgatctgcccaccttggcatcacacgtagtattttattaatgttaaatttcattagttttttttttttttgagacagagt

SEQ ID NO: 1040840 - DNA, 71 bp, Artificial Sequence
  ENSG00000281207_34 (sequence is synthesized)
tcacgatccacccgcctcagttagtttttatttatgttaaatttcttaatcataataatactattatgttc

SEQ ID NO: 1040841 - DNA, 120 bp, Artificial Sequence
  ENSG00000281207_35 (sequence is synthesized)
taatactattatgttccttattcttaggagataaacacaaaagtatttaaggataaaatctctcatctgcagttaactctcaaatggttcagtaaataaatgaaaaacattttaaatata

SEQ ID NO: 1040842 - DNA, 120 bp, Artificial Sequence
  ENSG00000253315_0 (sequence is synthesized)
agatgaaatatcaggaggaaagggaagggaggatctgtaattgaaaataaaagagtgaattatgaaaactgattaagccaaacccatcgtattcatatattcatgtgtaatatttaagaa

SEQ ID NO: 1040843 - DNA, 120 bp, Artificial Sequence
  ENSG00000253315_1 (sequence is synthesized)
accactgcctaatccaaggtcatgaagattaacatctatgttattaaaatgaagttctgaagaagctggatttatgtggctatggtaaatgtatctttaaaaactcttgaaggaaaaagc

SEQ ID NO: 1040844 - DNA, 120 bp, Artificial Sequence
  ENSG00000253315_2 (sequence is synthesized)
agtctgaaaaatccagtttgaaagtgagatttcagagcttcagcagaaacttagtcattactaaactgcatcaataaaataaaatgattatgcaagattcaatttaaagtgatttactat

SEQ ID NO: 1040845 - DNA, 120 bp, Artificial Sequence
  ENSG00000253315_3 (sequence is synthesized)
tttactatggaaagagaagaatctttccaaagcagatgaaaaaatcagtcatgcatctgaagtgctagacatcttcagaatcctagccaaaattctctctctctctgtctctctctctct

SEQ ID NO: 1040846 - DNA, 120 bp, Artificial Sequence
  ENSG00000261821_0 (sequence is synthesized)
tctagctgggtgacctctctgagcctcagtctcctcctctgaccatggggacaacaaacttcgcttgcaaggcctggaagaagatcagaagttggacaggagaggtccggccgcgcggac

SEQ ID NO: 1040847 - DNA, 120 bp, Artificial Sequence
  ENSG00000261821_1 (sequence is synthesized)
gtcaccttagcgcgccactgtcggctccggtgggctcgggtgagctcgggtgaacgcagcgagcgagggcagaggccagcagaggcgaggagtggatgctgcagggccgcaggccgggca

SEQ ID NO: 1040848 - DNA, 120 bp, Artificial Sequence
  ENSG00000261821_2 (sequence is synthesized)
gagaaacgcataccgggtcgctccctgcttcgccgccgcctcctggcagggccagcgaagccagtgctccagcgcccccgtaacacctcaaagcgcacggagtccgtgttggggaacttg

SEQ ID NO: 1040849 - DNA, 120 bp, Artificial Sequence
  ENSG00000261821_3 (sequence is synthesized)
gcggcagagtgactgggacctaggacctgcggtggggccgccgccgcctccgcggggccgagcgcctggacctcgccctgagaccgaggaggttgttttgttttgtttgagacagaatct

SEQ ID NO: 1040850 - DNA, 120 bp, Artificial Sequence
  ENSG00000261821_4 (sequence is synthesized)
gattatgggtgtgagccaccatgcctggccagacctggggtttggacccattaaagagcttccttacagatggctggcggtcttgccaccaattgtttcaaaagtagatgtctggtttag

SEQ ID NO: 1040851 - DNA, 120 bp, Artificial Sequence
  ENSG00000261821_5 (sequence is synthesized)
agtacttaagacattcacagattcaaatgttgaattttgaaatatccctgatatatttctgtattgtattaccaaaaaaaaaaaaaaaaaagaagttagacaggagtttggaaccagaga

SEQ ID NO: 1040852 - DNA, 120 bp, Artificial Sequence
  ENSG00000261821_6 (sequence is synthesized)
acagcctgttgggggagtggggactacagcagggctacccaggcccctcctcctccctgtcccttcggctcccaccctctgccaggcttacctgtaaatcgggccatacttctggaaatt

SEQ ID NO: 1040853 - DNA, 120 bp, Artificial Sequence
  ENSG00000261821_7 (sequence is synthesized)
ctggacatggtgaaggtggactttgtgtgtgcccgtctccctccagaaatggtacaggtttagccagccattgtcaccaggagaggggatctcattgaaggggcgaggactgcgggtgga

SEQ ID NO: 1040854 - DNA, 120 bp, Artificial Sequence
  ENSG00000261821_8 (sequence is synthesized)
gatgccagctccctcgccagtgggcaccctgagacgccccagcccctccctgggggcactcagaaaggtctggcagcctttgaccaggactgagcgtgggggaagacccttggccagcat

SEQ ID NO: 1040855 - DNA, 120 bp, Artificial Sequence
  ENSG00000261821_9 (sequence is synthesized)
gctgtccccacagctgtgactgtacctgctccacttcagcggggactgctaggatgactgtagccctgggccaccagggccaagattataactaccagctcaaggccataccagaagctg

SEQ ID NO: 1040856 - DNA, 120 bp, Artificial Sequence
  ENSG00000261821_10 (sequence is synthesized)
ataaaatgttcacgtccttcctcctgctgcaggctcaaacccgcagacagctcctcccctactcggtatgaaggttcagtctggaatttctgcagcgtgaggttctccaaaggacaggga

SEQ ID NO: 1040857 - DNA, 120 bp, Artificial Sequence
  ENSG00000261821_11 (sequence is synthesized)
gacccctctgtctctgccctcagtgccagccctagcagactcctgaaatatctgcctgtgcttttgcctgagctggggcctcccactggcccctgcagcggagtccatgccctggcagcc

SEQ ID NO: 1040858 - DNA, 120 bp, Artificial Sequence
  ENSG00000261821_12 (sequence is synthesized)
attggtcaagactgcagacaacctgtgtttgggggaaatgaggggcccaagagaaggtcagagctatcttgccagcttgggcaacatacgtcttagttatggccccactgtatagacaca

SEQ ID NO: 1040859 - DNA, 83 bp, Artificial Sequence
  ENSG00000261821_13 (sequence is synthesized)
gcaacatacgtcttagttatggccccactgtatagacacacatcattgaacaacagggataagttctgagaaatgcatcctta

SEQ ID NO: 1040860 - DNA, 120 bp, Artificial Sequence
  ENSG00000261821_14 (sequence is synthesized)
cgcaatggcacagtttcaccttggaaccctaatcctcgtcgtctctccccagttgacccagatttggggctgtaattcagtacagctgactcagaggggctctgggtcccttgagctgag

SEQ ID NO: 1040861 - DNA, 120 bp, Artificial Sequence
  ENSG00000261821_15 (sequence is synthesized)
gtctgtggtcaggctccactctggacacactctaagaccttggcaaatctggttgccatggaactcaggatgtcagctcttccctgtccacacacttgatctgtgctgctttcccctcag

SEQ ID NO: 1040862 - DNA, 120 bp, Artificial Sequence
  ENSG00000261821_16 (sequence is synthesized)
agctgcttccataccccctcccatcatatcatatccccagacccatccttccagcccaggtcagcccccacacccaccccccatcaccctgcacctaccactttcccaaacaacaagggt

SEQ ID NO: 1040863 - DNA, 120 bp, Artificial Sequence
  ENSG00000261821_17 (sequence is synthesized)
cagtcacctgtagagttttcaagtcatttcaacaaaattacagcccacttggtaaaaatgtgtaggtcagaaaacatacatgtgccatgtagagcatttcatgacagcaatctacactat

SEQ ID NO: 1040864 - DNA, 120 bp, Artificial Sequence
  ENSG00000261821_18 (sequence is synthesized)
aacttcttgctttttttccccaaaatcttattttctggcaaataaggcatttaaaacacacatctaagagacagaaaatagactggtggttgcttagagctagggggatagaggaattag

SEQ ID NO: 1040865 - DNA, 120 bp, Artificial Sequence
  ENSG00000261821_19 (sequence is synthesized)
aggatgggacataaagtgtgtagggattcttaggatgatgaaaatgaaaatattctaaagtatattgtggtaattattgaacaactctctgatacactaaaagccattgaattgcatact

SEQ ID NO: 1040866 - DNA, 120 bp, Artificial Sequence
  ENSG00000261821_20 (sequence is synthesized)
ttaaatgggtgaattgtatggtgtgtgaattatatctcaatagagctgttaccaaacacacacacacacacacacacacgagtgacatcctcctggcctcttctgttgtatgtgtcagcc

SEQ ID NO: 1040867 - DNA, 120 bp, Artificial Sequence
  ENSG00000261821_21 (sequence is synthesized)
catagatcacccacaatggcaaaagttgtccttacacagccacttgaccccagactccaatactgttgaaccactttcaacaaatttagagcaacagtttttagaagaaaaaaaaaaagt

SEQ ID NO: 1040868 - DNA, 120 bp, Artificial Sequence
  ENSG00000261821_22 (sequence is synthesized)
acttatcaagagtggttgttgctcttcccgctggagtgaccactacctcatcagtcatgaaccttctgataaagagagtatggagaaagcctgttttgcctcactgatgaccttgagcct

SEQ ID NO: 1040869 - DNA, 120 bp, Artificial Sequence
  ENSG00000261821_23 (sequence is synthesized)
ggaatgacatcagccaaggaaggcagtgtctcacgagcagcggcagggtgatgagcttccacaaagaaaagcagtcttccaaggactagtttttcctccaagggtctcagcactgaggtg

SEQ ID NO: 1040870 - DNA, 120 bp, Artificial Sequence
  ENSG00000261821_24 (sequence is synthesized)
acatttataactttctgacttaaagtcaatcccattgttctacgcagccccacattcctccctcagaaggagccctaatcgatgtggcatggaagaacttgtggtcctcttggcagccac

SEQ ID NO: 1040871 - DNA, 120 bp, Artificial Sequence
  ENSG00000261821_25 (sequence is synthesized)
cccaacttccgttcaggcctccgcacctcccccagtgttgtggggcactgaccgcctccccagaagtggcccgggctggaggttattgcctcatcctctccaatggccatggtcacatca

SEQ ID NO: 1040872 - DNA, 120 bp, Artificial Sequence
  ENSG00000261821_26 (sequence is synthesized)
cagcataggccagcgattcagtttgggccaatgaaacacagggaaaggtttgctgtggcttctgggagaatagctccctcacttctctgaaagagcttccagaaacacatcactcactcc

SEQ ID NO: 1040873 - DNA, 120 bp, Artificial Sequence
  ENSG00000261821_27 (sequence is synthesized)
aaacaaggctgaatgtattagctgtttactgctgcttaacaaattatcccaaaatttagtggcttaaaacaataaatgtttattatctcacagcttccgagggtgcagcacccaggagca

SEQ ID NO: 1040874 - DNA, 120 bp, Artificial Sequence
  ENSG00000261821_28 (sequence is synthesized)
gcttttctgggtgactgggtggctgggtggctgggtgactgggtggctgggtggctgagtggctcatgctcagggtttctcacaagcggctgccatccctgaagcttgaccagggtgtag

SEQ ID NO: 1040875 - DNA, 120 bp, Artificial Sequence
  ENSG00000261821_29 (sequence is synthesized)
gatcagcttccaagctcagtggattaaactggccctgcttcaaaacttttcagtggctgtttcaggactattgagaagattaatgaatgatacatacatttcaaaatatatatattacac

SEQ ID NO: 1040876 - DNA, 120 bp, Artificial Sequence
  ENSG00000261821_30 (sequence is synthesized)
atatacatgtgtatattacataatttttccctccctctctctgttcttgccagtgcccaaactgaaattttcaccctctcaaaagtgatgggaagttagggtccaaccctcaccaagccc

SEQ ID NO: 1040877 - DNA, 120 bp, Artificial Sequence
  ENSG00000261821_31 (sequence is synthesized)
cttacgatgggcaagtgaatcctctgctaggtgaggttagcctagtgctcggctatgccaaagtccttcttggctctctcaagacaggcccatacttatagtgctttctcctcccactcc

SEQ ID NO: 1040878 - DNA, 120 bp, Artificial Sequence
  ENSG00000261821_32 (sequence is synthesized)
tgcctcccacattctgtaactatcctatcattctcagagtagagggtgtacacatttagacccatctaaacgttgcctaggacggggaacatgattttattcattgcaggcagcttggat

SEQ ID NO: 1040879 - DNA, 120 bp, Artificial Sequence
  ENSG00000261821_33 (sequence is synthesized)
ggataaacagaaaatccaaatcacagacttaaagaagatagaagtgtattctctctcccataaaggatgtccaaggctgggcagtccagggtgagtgtgtcagtcccagcaaaatgccag

SEQ ID NO: 1040880 - DNA, 120 bp, Artificial Sequence
  ENSG00000261821_34 (sequence is synthesized)
gctccatcttcctgcttcaccacgaagacatttggttggcatttctaaggccacccgatggtccaagctgctgctggagcattaaccgtgttgctggccagaaggcggaagaactcaaga

SEQ ID NO: 1040881 - DNA, 120 bp, Artificial Sequence
  ENSG00000261821_35 (sequence is synthesized)
agaccaaaaggggccctccctgaagagccagcttcatttaagccccttcctcaaagtcccacacgagtccaaccatatctgattggtgggaacttaaccacattgaggcaggagaatagg

SEQ ID NO: 1040882 - DNA, 120 bp, Artificial Sequence
  ENSG00000261821_36 (sequence is synthesized)
gaattagggcaaccaaggattaaggtaggaacaaaagaagagcaggtgcagccagttcacataagcaaaaggcacagcaggtacagccaattctaggcaggattaggcaacatacaggcc

SEQ ID NO: 1040883 - DNA, 120 bp, Artificial Sequence
  ENSG00000261821_37 (sequence is synthesized)
acatcttcacttctgtgataaccacaggccaagtcgccacttaagcctctaattggtcacggatcaatccttcattggatgtaactgattggaggcctctggagggcaccgggggtgttc

SEQ ID NO: 1040884 - DNA, 120 bp, Artificial Sequence
  ENSG00000261821_38 (sequence is synthesized)
atgttctttagcttaataaaatctctaattgaaggggctcctgagccacttgctcaagcccactcttgctctgtgaattgtacttgcacatcttcaataaatctgtgccttcattactcc

SEQ ID NO: 1040885 - DNA, 85 bp, Artificial Sequence
  ENSG00000276030_0 (sequence is synthesized)
tgtgtgcacaaattttggcttaggagtcatcttttctcttaggttgatttttaattctaactcccagaaaacaattaatttatct

SEQ ID NO: 1040886 - DNA, 120 bp, Artificial Sequence
  ENSG00000276030_1 (sequence is synthesized)
gaaaacaattaatttatctttgttttatttgtcattgaggcccagcaaacctgaagtaaaagggtgagaaggtagggtgggtgctggataatgagaaattacttaagggttataatgtaa

SEQ ID NO: 1040887 - DNA, 120 bp, Artificial Sequence
  ENSG00000276030_2 (sequence is synthesized)
attatttgaatgatggataccctaaaagccctgacttcgccactatgcagtctatgcatgtaactaaattacatttgtacacaacacttttgtaaaaataaattaaaaagaacaactaga

SEQ ID NO: 1040888 - DNA, 120 bp, Artificial Sequence
  ENSG00000261829_0 (sequence is synthesized)
tccagcagtcggcttgtgcagggcagccttccaattgcccaaaatatgcgccctcccggacaccatccttggaagagaacctagttccttaccgatcctttcgtgcctcagtccacccag

SEQ ID NO: 1040889 - DNA, 120 bp, Artificial Sequence
  ENSG00000261829_1 (sequence is synthesized)
accaattccagccttggtgaggcgtttccctctgaccaagcacccacccatgggaggcccgtgtcacccggctgcgtttcgcatctctgctcccatgaataaatgtatttactctaaaaa

SEQ ID NO: 1040890 - DNA, 120 bp, Artificial Sequence
  ENSG00000250592_0 (sequence is synthesized)
gaaaagacaactggctactctttcaacgcaccatgacaacaagtcagactttaagagctattcacaaactaggagaaaaacaagaagtaaaagagaccagacaagcaaaggatgcacagc

SEQ ID NO: 1040891 - DNA, 120 bp, Artificial Sequence
  ENSG00000250592_1 (sequence is synthesized)
agacagcaagaccaacccctccttttcttcagcctactcaaagcgaagacaatgaggatgaagacctttatagtgatccacttctgcttaatgaattataaatatattttctcctcctca

SEQ ID NO: 1040892 - DNA, 120 bp, Artificial Sequence
  ENSG00000250734_0 (sequence is synthesized)
tatagagcaggagtgaaggcaggaggccagggaagggatgctctcagaggggtgtgctgatggagacgctagattccaaattagggtgtgatacggggccaaccgagaagagaaactacg

SEQ ID NO: 1040893 - DNA, 120 bp, Artificial Sequence
  ENSG00000250734_1 (sequence is synthesized)
gtgtcaaatcccacgccccccaccccaaaggcatgcaagggtcagaaagcaagttgcccgccctcgctcacttggccccgcacgttgaagccgtagccggactcggacttgacgatgcgc

SEQ ID NO: 1040894 - DNA, 120 bp, Artificial Sequence
  ENSG00000250734_2 (sequence is synthesized)
accccccgccgccgccgccacctccgttcctgtgaggggctgagggatgaatcccttccccgtcctcgtccgccatcttgcgagcaggcgagccgtacccccgccccctacgcctccaag

SEQ ID NO: 1040895 - DNA, 80 bp, Artificial Sequence
  ENSG00000250734_3 (sequence is synthesized)
cccccgacgcgcgcgcccgatccgccggccgcgggaccgactcggccaccgagctgctggcgcggggtgaagaggaggca

SEQ ID NO: 1040896 - DNA, 120 bp, Artificial Sequence
  ENSG00000224400_0 (sequence is synthesized)
ccagactgatccaattattacagcttcatagtaaggtggtgtttggaatgcaccacactctcgatgtgcgtacagagaagatggctggctggctggatccagggttttaatgtttccagg

SEQ ID NO: 1040897 - DNA, 120 bp, Artificial Sequence
  ENSG00000224400_1 (sequence is synthesized)
atggggcacctggattcaaaatctgcttacaccatccacggagcctgggatgttgaagaattagttttttctcttggaacttgctttccttacttgtaaaataaagttaatcctacaaac

SEQ ID NO: 1040898 - DNA, 120 bp, Artificial Sequence
  ENSG00000224400_2 (sequence is synthesized)
gttgcctaaatgtggcaatagaataattttttttttccatttctaacttggaagaggattcttccaacaatttttcatttagggaatgcaccacactctcgatgtgcgtacagagaagat

SEQ ID NO: 1040899 - DNA, 120 bp, Artificial Sequence
  ENSG00000224400_3 (sequence is synthesized)
ggtctccaaccattgatattggcccatttacttatttcacaggacaagagcatgggaacaaccatctcctggaatggcccttccacaggaagagaggaggacacatggcacagaggaagg

SEQ ID NO: 1040900 - DNA, 120 bp, Artificial Sequence
  ENSG00000250590_0 (sequence is synthesized)
atatgtcagaaggaggatcatctgctgtgggtgttcctgatctttgagccatgataatgttactggttggatgtcaggagcaggccatgtggatgattaaaagatgaatatcatatacag

SEQ ID NO: 1040901 - DNA, 120 bp, Artificial Sequence
  ENSG00000250590_1 (sequence is synthesized)
catggatatgttggacaaaaagatgattcacatcccagacagaatggagcagcacatttattaaaagccagaagctagaagacgaggaaagaagaggtggttaaagaaagatacagtaac

SEQ ID NO: 1040902 - DNA, 120 bp, Artificial Sequence
  ENSG00000250590_2 (sequence is synthesized)
agcagtaatatctaacaggaaggctacaggggaaaatacagaaattccataaagaacaaacactgtaactcaaaaccaaagctttgctagtcactagtgcccgctacatcctaacagatg

SEQ ID NO: 1040903 - DNA, 120 bp, Artificial Sequence
  ENSG00000250590_3 (sequence is synthesized)
cagctggagagcctggggtgagaacatgagcagtctataatcagaaaatccctttgggataaattgacaaaaatataaaccactccacaaaggagaaattgtaaatgagttgttatgtaa

SEQ ID NO: 1040904 - DNA, 120 bp, Artificial Sequence
  ENSG00000250590_4 (sequence is synthesized)
aacctcccagcgaaagaaatagtccagaaagcttgaagagaaactgaaatttgaaaaatctacctaaaaaggtgataaaggattttcagttttgcaaaaaacgcaatacagagtgtcttt

SEQ ID NO: 1040905 - DNA, 120 bp, Artificial Sequence
  ENSG00000250590_5 (sequence is synthesized)
tggatttaaaatatgattcaatttacagaagtcagagttgttcttccagatggcatgaatccaacagtgaagaaatcagaatacgttgcttttgtgaggggcagctgctgattttctctg

SEQ ID NO: 1040906 - DNA, 120 bp, Artificial Sequence
  ENSG00000250590_6 (sequence is synthesized)
agctccgtttccagccttcacatgctctgctattcatcacagggtaaattctgactataggaggtactgacagaagattagggaagaacagagggctaaatgtttattgacttcttgaaa

SEQ ID NO: 1040907 - DNA, 120 bp, Artificial Sequence
  ENSG00000250590_7 (sequence is synthesized)
aatgctatgtgtcttgccagacttagcttacaagtttggttaaagagagactgacatgagcataaaggaagggacattgaaagaggcagagatgaaggaagaaattgtaacttactcctt

SEQ ID NO: 1040908 - DNA, 120 bp, Artificial Sequence
  ENSG00000250590_8 (sequence is synthesized)
ttatcccacccatcaaaggaaagacaagttgacaagtattgattctgcaacaaactgagaagaaacctggcgattcacaacagagagctgagaaatcctaagtctggattccagctaaat

SEQ ID NO: 1040909 - DNA, 120 bp, Artificial Sequence
  ENSG00000250590_9 (sequence is synthesized)
gggagcagactaaatagagcggcagtcggcgaactacatgtagcccatgaacaaaatccggtccagcacgtgtgtttttttttacggcccacaaatgagtctgtctttacagatgaatgt

SEQ ID NO: 1040910 - DNA, 120 bp, Artificial Sequence
  ENSG00000250590_10 (sequence is synthesized)
taaaactgggttgacaagagagaacactcactttgaaccgcaactaaacaaaatattatcacctttcccctcaaaaaaggtttttgttcttctcattagtaaatttgtattatgacaaaa

SEQ ID NO: 1040911 - DNA, 120 bp, Artificial Sequence
  ENSG00000250590_11 (sequence is synthesized)
aaccttacctctttccattgtgtctgtagccgcaggagcagtaacagcttcccaagcatggctcatgtctggttaactcatgatcccctttctaataaaaatatacctgtagatcaaaaa

SEQ ID NO: 1040912 - DNA, 120 bp, Artificial Sequence
  ENSG00000250590_12 (sequence is synthesized)
agatcatcatggcggacgggaggcaggactacattgcagctcccgacagggcagcgtgcggggctcgcattgtgacttttagctccagatggactgcaggaagaaaccagcagtcccgag

SEQ ID NO: 1040913 - DNA, 120 bp, Artificial Sequence
  ENSG00000250590_13 (sequence is synthesized)
aggacccgcagaccctctgaaggaagtgggctgctcctgcaggacccgggagacccccgcaaaagtctgaatgcaacagcccctggtttcctgctctgtgaggaatggctagaccacatc

SEQ ID NO: 1040914 - DNA, 120 bp, Artificial Sequence
  ENSG00000250590_14 (sequence is synthesized)
acttagtagaaaaacagactttataaataagtttaattttccaaatattttattgcttaagaaagtgacttccctgatttggagaatttagttccaagaagggattcatttcctagtgat

SEQ ID NO: 1040915 - DNA, 120 bp, Artificial Sequence
  ENSG00000250590_15 (sequence is synthesized)
gttgagggttgctctgcccaggtacccttaagatatataattggagaattttttattagtatgacacaaagagactcagccttaataagaattttatgctcaacatgaaattaatatttt

SEQ ID NO: 1040916 - DNA, 120 bp, Artificial Sequence
  ENSG00000250590_16 (sequence is synthesized)
gcttttgaaatagtgtagtgccattattttactcttaacatttaacaattttttttaaaagaaagtaacacgccatttttatttcttgttaaaataatgttaattgtaaaaatgtagaca

SEQ ID NO: 1040917 - DNA, 120 bp, Artificial Sequence
  ENSG00000250590_17 (sequence is synthesized)
gtggggagaaaaatcattcatagtcccaccagcaaaagacaaacactgttaaaacgtatgtgtgttattttagcctcttttttttttttacattgctatgctcttctaaagattcctcag

SEQ ID NO: 1040918 - DNA, 120 bp, Artificial Sequence
  ENSG00000250590_18 (sequence is synthesized)
gttatctaatttttattatcgatagaaactaaagttattaccctttgtgtttccaaatgtgtgtaacatctcaataatgtgctttaaaagaataaattatttcaatatccatgaacccca

SEQ ID NO: 1040919 - DNA, 120 bp, Artificial Sequence
  ENSG00000250590_19 (sequence is synthesized)
aatactgagtgaagaaatttgttggattccaagtatttttccttaaaggaaatatttcaatgagcagaataaatttcccagggtggatggatccaggcaggacaggatcagaagttgcag

SEQ ID NO: 1040920 - DNA, 120 bp, Artificial Sequence
  ENSG00000250590_20 (sequence is synthesized)
gaaagacaagttgacaggtatctgcagtcttgccaattaggcctgcaaaggaaacaaacatacgtgtgttccaatcggagaagtcagaagtcactaatgatgcagaaaagcacattccaa

SEQ ID NO: 1040921 - DNA, 120 bp, Artificial Sequence
  ENSG00000250590_21 (sequence is synthesized)
gttttggcaatgccatatatgttagaaattatactacaatgcagttagaaaatatattttttaaaagtccaaaaagatgaaggaactatttgggatcaggctgcaaagctctttattatc

SEQ ID NO: 1040922 - DNA, 120 bp, Artificial Sequence
  ENSG00000224406_0 (sequence is synthesized)
cccccgcccaccgcctcagcaaccaacctccagggaggggaaagggggcagaagtttgagttaataactaatagctaaagatgtaaacaataagcctccataaaaccccaaaaggactgg

SEQ ID NO: 1040923 - DNA, 120 bp, Artificial Sequence
  ENSG00000224406_1 (sequence is synthesized)
actggtttctgagagcttccaggttgttgagcacgtggaggttctgggagggtccacacccagagaaggcatggaagctgaccccttccccataccttgctctttgcatctcttccattt

SEQ ID NO: 1040924 - DNA, 120 bp, Artificial Sequence
  ENSG00000224406_2 (sequence is synthesized)
ggctgttcccgagttgtatactttgtaataagtgggatttccacccaacaacaattcagccacactgcttcacacatctagaatccatccaaaattgtaaaggctttgtggcactacagt

SEQ ID NO: 1040925 - DNA, 120 bp, Artificial Sequence
  ENSG00000224406_3 (sequence is synthesized)
gaaacaggcaagaacatcttccaaacatccagcacaagagcacacaggaggccggcataatcacgaattgcagctgtctgaagggcagtcacataaaagaggagaagcttcacctttgct

SEQ ID NO: 1040926 - DNA, 120 bp, Artificial Sequence
  ENSG00000224406_4 (sequence is synthesized)
tcacaaggcacatcttgaaccagggatggaaattacagagaggccaaaaccagctcggtgtgagcaggactggtaacagactggccaagcaacagaaggggctgccctgtgaagaagcaa

SEQ ID NO: 1040927 - DNA, 120 bp, Artificial Sequence
  ENSG00000224406_5 (sequence is synthesized)
gctctctgtcaatgggaggtgcaagctgagcctgcactaccttttgtcacggttgctatggaaaagattaagagcccgggctgcttgagtgtctgcatgacatggcagctggctccctga

SEQ ID NO: 1040928 - DNA, 120 bp, Artificial Sequence
  ENSG00000224406_6 (sequence is synthesized)
tcttcaacagcatatctttgaaagtcatattccaccgttttcactacattctattgataagatagcccttcctcctctgggggcctgggcatcagcaagtcggatggcagtggaaggtgg

SEQ ID NO: 1040929 - DNA, 120 bp, Artificial Sequence
  ENSG00000224406_7 (sequence is synthesized)
agaaatggaatcctgctgggggctcaggaggcctgccccctgatgctgccgtgcactgcagatgtccttgatgaagagaatgaatggaagctgtctttctcaatggcaaaagggcatact

SEQ ID NO: 1040930 - DNA, 120 bp, Artificial Sequence
  ENSG00000224406_8 (sequence is synthesized)
gctgttattgtcagtgaggggtcagtagtttaaatgatgaaactctggggatcagcgtaaagtaaaccaacatactgcatgtaaattcctcattcttactgctgtgagaacaattgttag

SEQ ID NO: 1040931 - DNA, 120 bp, Artificial Sequence
  ENSG00000224406_9 (sequence is synthesized)
gagccaaaaacttcagagctttcaaagaactgtaatgagatagcacaatgcaggcaaaaagccagtgttaacggagcaagaaacttcccagttctgacattcacagcatgacctagagca

SEQ ID NO: 1040932 - DNA, 120 bp, Artificial Sequence
  ENSG00000224406_10 (sequence is synthesized)
tgcggattcccctctctgagtcactggtttctcacctgcaaaagaaagcggggacagggaaggaggaagaagcttcgagaggctggaacagttgagggagcgctgacacggtaaaggcca

SEQ ID NO: 1040933 - DNA, 120 bp, Artificial Sequence
  ENSG00000224406_11 (sequence is synthesized)
ctttgctcatcatcaccaggcgtgctgccgaaaatttccactctgtttactcccaagaccttactcctactatgtggagacacatttgaataaaaaattggcctcttttcaaagtcaaaa

SEQ ID NO: 1040934 - DNA, 120 bp, Artificial Sequence
  ENSG00000224406_12 (sequence is synthesized)
gagcctgcttttaaaaattgggtgtcagagcaagccccgagggcagcagctgtgggcaggctggaggaaatggtccctgtttaggtgctgcactggtctctgcatgatcaatcccagcgc

SEQ ID NO: 1040935 - DNA, 120 bp, Artificial Sequence
  ENSG00000224406_13 (sequence is synthesized)
ccagaacaccgatatcaaggcctttgcctggctcttctccagatggttttctattgcaggagttttgctggcagagagcttatgaagaaacaggcttacagaaggcacggccaggctgca

SEQ ID NO: 1040936 - DNA, 120 bp, Artificial Sequence
  ENSG00000224406_14 (sequence is synthesized)
gggatgactgggacctgaaaacagccagcatcatcattcttgaaagtttagaaacgaggcatgtatacgtatttaacagttctcagaatgtcaaggatccctcctcagagcaagagctcg

SEQ ID NO: 1040937 - DNA, 120 bp, Artificial Sequence
  ENSG00000224406_15 (sequence is synthesized)
aatttacaaaagaagcactacctcctttatcacatagtaaaataaaggaccgtgtctgctccaggacatggctggttacaattttgttttaaagaaatcaccagaaaaaactaggttata

SEQ ID NO: 1040938 - DNA, 120 bp, Artificial Sequence
  ENSG00000224406_16 (sequence is synthesized)
gacaattgtgagttgtctgtcaagtaccaacattctgtagcagatcagcaaattttatgaatataccatctcacaatttttatagagaaacctgagattccaacccagccttttgtttgc

SEQ ID NO: 1040939 - DNA, 120 bp, Artificial Sequence
  ENSG00000224406_17 (sequence is synthesized)
gattatagcccagttcttacaagcagagaagcctaggacactaacccagcttcaagagtatactcagaatctcaagaatcacaatctgtgctgcccattcttcaacagactgtcatctgg

SEQ ID NO: 1040940 - DNA, 120 bp, Artificial Sequence
  ENSG00000224406_18 (sequence is synthesized)
aggcctggattggatcaggagtcgggctcaccaatggagccccaatcagtcagtcaggagtgaagatgaaagcttcaaaggcattgatgactcacttctcacttgagtccagacccatct

SEQ ID NO: 1040941 - DNA, 120 bp, Artificial Sequence
  ENSG00000224406_19 (sequence is synthesized)
ggattgcctgcaaaaaggtctcggcagtgacctgaaaacatatgtaaattacccaaccaattctaaccaggacctgctgtctggcaattcatccccatgttctagacttgtccaacaagc

SEQ ID NO: 1040942 - DNA, 120 bp, Artificial Sequence
  ENSG00000224406_20 (sequence is synthesized)
gacttgtccaacaagcacccaagcaactttgagttccatcctgcaactctcagtcaggctcaagaaaagccccaattttatctgggcatggtgacacatgactgtaatcccagctactcg

SEQ ID NO: 1040943 - DNA, 120 bp, Artificial Sequence
  ENSG00000224406_21 (sequence is synthesized)
aagttgttttctaatgctcacgcgctatggccgaagtctgcaatggatgggagaaaggggaggaccaaattagctcagattctttacagttcacagcatcagctgttttatttatttgtt

SEQ ID NO: 1040944 - DNA, 120 bp, Artificial Sequence
  ENSG00000224406_22 (sequence is synthesized)
ttagatagcgaagccaaaaaaagttggatgggggcaaaaatgccaactaaaatagctcatagttctgaagtagagagaagtcagaatttcccgttttctcttgtttctctcagggatggt

SEQ ID NO: 1040945 - DNA, 120 bp, Artificial Sequence
  ENSG00000224406_23 (sequence is synthesized)
ctatatgactggcgctccttggaagcagtgctgagggcattatcaagagtttccagggcctcctctttctcctgaaaccttcttcaaggagggtaaagttttaagagagttcaaaagtac

SEQ ID NO: 1040946 - DNA, 120 bp, Artificial Sequence
  ENSG00000224406_24 (sequence is synthesized)
cacagacttccagggaatagtagtttttgtcgtgacaagcatggacattttcttgcgtcatgtactatttcagaaggtagagaccacaaaaaggcttcttactgtggccaccgtggacat

SEQ ID NO: 1040947 - DNA, 120 bp, Artificial Sequence
  ENSG00000224406_25 (sequence is synthesized)
cttcccacatctacaaggtgttgtggccacatcattgctgcacccagtttcctcagaagaaatacctgttgcttaggtttagaaacgaggcatgtatacgtatttaacagttctcagaat

SEQ ID NO: 1040948 - DNA, 120 bp, Artificial Sequence
  ENSG00000224406_26 (sequence is synthesized)
gtccttgatgaagagaatgaatggaaggtattggaagggagctgaagttcaacaaatgaccacctaatgaaaaagtcagcagtggattgcttgagatcttgagcaccctgtactgttatt

SEQ ID NO: 1040949 - DNA, 120 bp, Artificial Sequence
  ENSG00000224406_27 (sequence is synthesized)
agtatttataaacatgtttgaaagatgttcccttccttcactgtagtgccagaaagcctttaacatattgggtccggtctagatttgtaaggaagtatggctgaattgttatcgggtgga

SEQ ID NO: 1040950 - DNA, 120 bp, Artificial Sequence
  ENSG00000224406_28 (sequence is synthesized)
catactgcatgtaagtatcaagtaaatgagcagagacagcccctggtttacaaacacctgacttaagcatcgtccatcctacaggtaaattcctcattcttactgctgtgagaacaattg

SEQ ID NO: 1040951 - DNA, 120 bp, Artificial Sequence
  ENSG00000224406_29 (sequence is synthesized)
cgttttcactacattctattgataaggcctggctgttcccacctcaaaccacttcttagcttcatttgttctcataacaacaggatagcccttcctcctctgggggcctgggcatcagca

SEQ ID NO: 1040952 - DNA, 120 bp, Artificial Sequence
  ENSG00000224406_30 (sequence is synthesized)
gcttagctgggtggggtctccgggttggtctctcgtgaggctccagtctagatgttggctggggatgcagtcgtctgtcagcttggcgagggctggatgatctgcttccggaatggccca

SEQ ID NO: 1040953 - DNA, 120 bp, Artificial Sequence
  ENSG00000224406_31 (sequence is synthesized)
ctcacatggctgtgggaaacaggcctcagcccctctccatgtggcttctccatagggctgcttgagtgtctgcatgacatggcagctggctccctgaagagcacgtgatccgaaagagag

SEQ ID NO: 1040954 - DNA, 120 bp, Artificial Sequence
  ENSG00000224406_32 (sequence is synthesized)
gcattcacagaggggcctagccaggcagcctgaccctgtagacctgctctgctccagagaacagtggaggggagggtggctttgcatggaagcttacactatagtaggatgaaaagattg

SEQ ID NO: 1040955 - DNA, 120 bp, Artificial Sequence
  ENSG00000224406_33 (sequence is synthesized)
gcttgggagactgtgaaggctcaaaatttttattccagtctatctactagctcccaggggatgtgtctgggagagctctcagttgtgtgatgctgggaggagctttagatcccctcagcc

SEQ ID NO: 1040956 - DNA, 120 bp, Artificial Sequence
  ENSG00000224406_34 (sequence is synthesized)
ctggcttactggtctgcaatgggagaatagcacaattaatggagcagacaataaccaaatctgttaaatgatttcaggtttagaaacgaggcatgtatacgtatttaacagttctcagaa

SEQ ID NO: 1040957 - DNA, 120 bp, Artificial Sequence
  ENSG00000224407_0 (sequence is synthesized)
cacgctttgctcgaagggctcttaggaaagaattctgagttttaaaaacaggagtgggagggtgagatagtcctgatgattaaaaactaacgcaaccgcagtaagtcactttggcacact

SEQ ID NO: 1040958 - DNA, 120 bp, Artificial Sequence
  ENSG00000224407_1 (sequence is synthesized)
gtgtcatgtaaacatagctcaccgcaaaggacccctccccggcccacccctgctcttgacgcccggaccatccaaagccgcctcccagctcagggacaggacgccgcccccagggcatgg

SEQ ID NO: 1040959 - DNA, 120 bp, Artificial Sequence
  ENSG00000224407_2 (sequence is synthesized)
gccgcacaagggtctgggtagacacgtgggatgataggaaggctgagagggcctaggggtgcgggcggggtaaaggtgaaggggcaaaggattcgtcagaaaacgtgattttaaaacgag

SEQ ID NO: 1040960 - DNA, 120 bp, Artificial Sequence
  ENSG00000224407_3 (sequence is synthesized)
ccagattcatccatttccctccttacagtagtagcagctcgcaggggtgacgaggaacattcctgagcacccaggtagaagccaggcacctctccccgttatgactttcagttcataact

SEQ ID NO: 1040961 - DNA, 120 bp, Artificial Sequence
  ENSG00000224407_4 (sequence is synthesized)
ttgtttggttctgacccttcctaattctttccccaaagccccctgaagcagtcatcttggccaggcggggtgtgggagggagctgcgggcggggcaggactcgctgcctggctggagctc

SEQ ID NO: 1040962 - DNA, 120 bp, Artificial Sequence
  ENSG00000224407_5 (sequence is synthesized)
cccaggccagcaggtgtgcaggactgtgagccaggcctgtgccctggctgacgggctcatccctgacactgctggccattaattctgaaggcccagcgtgcagggctcagatcacaatga

SEQ ID NO: 1040963 - DNA, 120 bp, Artificial Sequence
  ENSG00000224407_6 (sequence is synthesized)
agccaatactagcgtgtgacagctgcctggcatcattggtctgccctgtcgccagggggcagcggtattgctggctcacacagagctatggggtatgtcttatattccttagagaaaaga

SEQ ID NO: 1040964 - DNA, 120 bp, Artificial Sequence
  ENSG00000224407_7 (sequence is synthesized)
aatttaatgtaaaaagacccaaagtgatatctgtcaaaataagtaaccgctccaggttcacagatacgcacagcacgcaaggtggattctgacgcacagtagggactctcaggctgacgc

SEQ ID NO: 1040965 - DNA, 120 bp, Artificial Sequence
  ENSG00000224404_0 (sequence is synthesized)
catttgtgctgcatcaggtagaggtgggtaccctcccttatttctttaatagtgtggagattagcacctggcacatcccaggaattgggaaagccgctgagtactcacactgtagttaag

SEQ ID NO: 1040966 - DNA, 120 bp, Artificial Sequence
  ENSG00000224404_1 (sequence is synthesized)
gctggtcctggcagcagatgccactgaaacctaaaacatacaccatctctgctctttgaagcctgcaaaccttctgacaaagaagcagccttgaaaagacaaaatggatccagcagggaa

SEQ ID NO: 1040967 - DNA, 120 bp, Artificial Sequence
  ENSG00000224404_2 (sequence is synthesized)
ttagacagaaaatatttacagactcggtgaaccaagagctgggtgttccgggctgttgaagaaaatggagtaatgggatagaagctgctttcaacttcctgctgaggacccaaggccagg

SEQ ID NO: 1040968 - DNA, 120 bp, Artificial Sequence
  ENSG00000224404_3 (sequence is synthesized)
aaaaaagaaaatttttggatatcagaaatcagaacaggcctggagttggggaataaattaggaaagacacggactcaagcaaaggaagacatcagaagtagaggttggccaaaggacaaa

SEQ ID NO: 1040969 - DNA, 120 bp, Artificial Sequence
  ENSG00000224404_4 (sequence is synthesized)
cacaacattttatggaagatgaacaggtagatagacaaacagatatgagtacatagctaggtaagttggtagataggtagcaggattctctgtctccctattccttctggtaagaagata

SEQ ID NO: 1040970 - DNA, 120 bp, Artificial Sequence
  ENSG00000224404_5 (sequence is synthesized)
aaagctaatgacttcaaaagcataactgtgcattcaatattcatagaaagggtctgtgtgtggtaggaaagagacacaggacaggcatgcttgtcaattaaaagattacggtagtgtggt

SEQ ID NO: 1040971 - DNA, 120 bp, Artificial Sequence
  ENSG00000224404_6 (sequence is synthesized)
aaactagccttataagcctgggtgaggattattggtgcagtattaaccctcacaggaatagatacccagttacgttttactactccaggctgttgaagacaactggaataaaaagtcaag

SEQ ID NO: 1040972 - DNA, 90 bp, Artificial Sequence
  ENSG00000224404_7 (sequence is synthesized)
tactccaggctgttgaagacaactggaataaaaagtcaaggcagtggccagatgcagtggcttaagcctgttagatcaccagagatcagg

SEQ ID NO: 1040973 - DNA, 120 bp, Artificial Sequence
  ENSG00000224404_8 (sequence is synthesized)
atccttgagcagtcccttcatgaaaccacagcagatgtttctcagtcctttcattttcttttttcagaggaattgtaatcggctgcgctttaattaggatctccccgaggatacttcggc

SEQ ID NO: 1040974 - DNA, 120 bp, Artificial Sequence
  ENSG00000224404_9 (sequence is synthesized)
tttcttccacacccgggagtttgcagattccctcttagtgcaccaggctgattagatttcttaattccctaaaatatgctgtctcgaagcctaatacccctgtagggatgaggtctgttt

SEQ ID NO: 1040975 - DNA, 120 bp, Artificial Sequence
  ENSG00000224404_10 (sequence is synthesized)
ctctgcctctcctcccattacagtgctaaatccaggcagtggtctcccttacggcacttgcttcttccctggctccggaccccttttttggatggcctgcaaaccttctgacaaagaagc

SEQ ID NO: 1040976 - DNA, 120 bp, Artificial Sequence
  ENSG00000224404_11 (sequence is synthesized)
tgctctgagaggccagcaccacaccctcttgaccatgctgtagccataaatgttccagaggcatctgagaaaaccactgcagaatacacagagcacagctgcattttgtctgctccacct

SEQ ID NO: 1040977 - DNA, 120 bp, Artificial Sequence
  ENSG00000224404_12 (sequence is synthesized)
acaacagggtttgctctaccctgccatatcagaggctcctgaaaagaccaactcacagcaccacaggatgtgattaagccttggagaagattaattacccactttcttaggagtcggtct

SEQ ID NO: 1040978 - DNA, 120 bp, Artificial Sequence
  ENSG00000224404_13 (sequence is synthesized)
ctcctccccactcactcaagttcctttaccccccactaagcctctgaaagaatctaacatcataaacaaggatctcattagcaacttgaattcgggctgcagatcttttgtgaagatttg

SEQ ID NO: 1040979 - DNA, 120 bp, Artificial Sequence
  ENSG00000224404_14 (sequence is synthesized)
gttacagatgctgctttaacttctgaggattattcttcagcatccagagagactccagttgctcccctgggaaatgttccctcacttgaataactcatctgttcacccattggcataact

SEQ ID NO: 1040980 - DNA, 120 bp, Artificial Sequence
  ENSG00000224404_15 (sequence is synthesized)
gctgccagttctaagcacctgctgaggagtggacccagattaggcctctggcagggctacaaagaaggcatttcagtgttggacttcccattccatttgcatcttcaggggaagttaatg

SEQ ID NO: 1040981 - DNA, 120 bp, Artificial Sequence
  ENSG00000224404_16 (sequence is synthesized)
tcccactcaagtttctctcagttagggtgacagggagatgcagttcttcaaatgctgtcctcaagtagagagggagaccacagagctccgactggcttgccagcccatggagccattttt

SEQ ID NO: 1040982 - DNA, 120 bp, Artificial Sequence
  ENSG00000224404_17 (sequence is synthesized)
tctttggtggtggatgctctcggtgtggcctctagagctcctttcatgatccttttctctctgcattcccactgctctcccctcgggtgggtccacatcacctctcgcctggacctcagt

SEQ ID NO: 1040983 - DNA, 120 bp, Artificial Sequence
  ENSG00000224404_18 (sequence is synthesized)
ctgtctcttctctgctaaccagggtgtcttcacttctctgcagctttcacacggcagccagattaatgttcctcagtgcagctttgatcacaccactgtgcccaaacaaaatctttcatg

SEQ ID NO: 1040984 - DNA, 120 bp, Artificial Sequence
  ENSG00000224404_19 (sequence is synthesized)
gcccccagctacccagtgatcaaagtccagggtcctcactccagcattaaagagcctctgtattgtggatcccaaatcatcacatgccccacctccatcacccatctgttccactcccac

SEQ ID NO: 1040985 - DNA, 120 bp, Artificial Sequence
  ENSG00000224404_20 (sequence is synthesized)
ctacctcaacctcagttctagtccttcaagctgcaggcagcagctcattgagaaggtcatgaaatcaatgaagtatgtgacgaaagcattttaaaatgaaatttatagcaaaagaacaaa

SEQ ID NO: 1040986 - DNA, 120 bp, Artificial Sequence
  ENSG00000224404_21 (sequence is synthesized)
tatgtatatggctttctatatagcaggctccattccaaatactttgcatagactcacatacttctcacactgtccctagggaaataagcactcttgctatccctgttttacagataagga

SEQ ID NO: 1040987 - DNA, 120 bp, Artificial Sequence
  ENSG00000224404_22 (sequence is synthesized)
cacagacccagggaggttaaataagttgtccaaagtgattaattctggcttgaacccagagagccttgtatcagaagccacactctgctatactccccatgatgtactatatggaataaa

SEQ ID NO: 1040988 - DNA, 120 bp, Artificial Sequence
  ENSG00000224404_23 (sequence is synthesized)
actatattctagattttgtaaaaccatatggaacagaatagaaaatttagggcattctgtatatacaatggtaaatgttccatgaaggtctgttggagataaatataaatgtatacacac

SEQ ID NO: 1040989 - DNA, 120 bp, Artificial Sequence
  ENSG00000224404_24 (sequence is synthesized)
aagactacagtagaaaatgtgtattgtgctgagtacacaaggtcaagtgtttgtcttactgtggcttgtgggcaaaaacatgtgaaacctgttgttctggctaaaaccaaggaactgcca

SEQ ID NO: 1040990 - DNA, 120 bp, Artificial Sequence
  ENSG00000224404_25 (sequence is synthesized)
acatcttcacccacactgatcccagcactggaaacatctttccccgtcgtttctcacctgtatctctggtccaaacatgtcttgtccatggagtctttcttaattcttctctttattctg

SEQ ID NO: 1040991 - DNA, 120 bp, Artificial Sequence
  ENSG00000224404_26 (sequence is synthesized)
tcttctaaattataagcttcttgagggcttaggtacatacatttcacaatcagttcttgcttcctgacaaagaaggaagcatcttccaggaggcttttactcccaacctactttcaaccc

SEQ ID NO: 1040992 - DNA, 120 bp, Artificial Sequence
  ENSG00000224404_27 (sequence is synthesized)
ccattggtgtgatgagatttctgatattcgtcttctttctgtgatagtttgggacaatggttctcaaagtgtggtccccagaccagcaacatcagcatcgcctgggacttgttagagatg

SEQ ID NO: 1040993 - DNA, 120 bp, Artificial Sequence
  ENSG00000224404_28 (sequence is synthesized)
cgtattctcaggccccatcccagacctactgaatcggattatctgagggtgaacaacagcagcgtgtgctacaaccagccttccaagtgattctgatgcttgtgcaagttcgagaaccac

SEQ ID NO: 1040994 - DNA, 120 bp, Artificial Sequence
  ENSG00000224404_29 (sequence is synthesized)
tggcttaagaaaaagccattcttattcaatatgagagaagggtttgtttcatgactctgggccagttggctgcattgtattgcttatgaggacaaggtcaggggatcaactttgtgtatc

SEQ ID NO: 1040995 - DNA, 120 bp, Artificial Sequence
  ENSG00000224404_30 (sequence is synthesized)
caagtcagcaacatgtcacaccacacattgaatcccccaaccctagcttttgtgcaattgcaagctatttagtcccaaaagaactatggatgtctcagtgccaaagctaactcacctaaa

SEQ ID NO: 1040996 - DNA, 120 bp, Artificial Sequence
  ENSG00000224404_31 (sequence is synthesized)
ttactactgtcatcgcattaatggagccagactcacagccacgagccatcaagcaccctgcaggggacagtaaaagcagaaccaggaatggacaaagacattgttagaagtcaagagaac

SEQ ID NO: 1040997 - DNA, 120 bp, Artificial Sequence
  ENSG00000224404_32 (sequence is synthesized)
atggactttctaaataccaaagcattttagaaggtatggctaaaacagattgcaaatgatgaaaggcagtaaaaatccaagtgggtttaggatgggaaatttcaaatttcataggaaatc

SEQ ID NO: 1040998 - DNA, 120 bp, Artificial Sequence
  ENSG00000224404_33 (sequence is synthesized)
caaggtcacagaaataataaaccagaatgacctaggagctagcacttgatagattcaggagcatttccatggacagacattttatatttgaagaaactcgaatctatattccaagaagtt

SEQ ID NO: 1040999 - DNA, 120 bp, Artificial Sequence
  ENSG00000224404_34 (sequence is synthesized)
aagaaacaagatcatgcaatgaggaaatagcagaatagaatgcaaaccaactttttttacccaggagtctcaactaaaggtctgcctgccctgccgagggcactcccctctctgcggttt

SEQ ID NO: 1041000 - DNA, 120 bp, Artificial Sequence
  ENSG00000224404_35 (sequence is synthesized)
ctcttctacactcctgccacactggccccagtgctgccatgtccactcccagggctctgcacttactcttccttctcttttaagtattttttcgctagctgttcccagagctgcaccctc

SEQ ID NO: 1041001 - DNA, 120 bp, Artificial Sequence
  ENSG00000224404_36 (sequence is synthesized)
ctcatcctttaggcctcaacccaaatgttacttactcagagagttcttccctgaccacccagcccacacttctgtgactgtacaagtttcctggggctgctgaaacaaatgactgcaaag

SEQ ID NO: 1041002 - DNA, 70 bp, Artificial Sequence
  ENSG00000224404_37 (sequence is synthesized)
tacaagtttcctggggctgctgaaacaaatgactgcaaagttggtgacttaaaccaccacaacataagtt

SEQ ID NO: 1041003 - DNA, 85 bp, Artificial Sequence
  ENSG00000224404_38 (sequence is synthesized)
cagcctggacaacagaacgagactccatctaagttttttcacttacagttctggaggccaaaaatccaaactcaaggtgtcggca

SEQ ID NO: 1041004 - DNA, 120 bp, Artificial Sequence
  ENSG00000224404_39 (sequence is synthesized)
cagttctggaggccaaaaatccaaactcaaggtgtcggcagggccatgtgtctctgaaggcactaggagaaaacctgccccatgctcctctcctagtttctggagaggagccactcatga

SEQ ID NO: 1041005 - DNA, 120 bp, Artificial Sequence
  ENSG00000224404_40 (sequence is synthesized)
catttcttgacttgcggctgcatgacttccagtggcaccgtcctctctgtgtctgtgttaaatatccttcataagaacaccattcatcggattagggcacaccttaacaccatatggcct

SEQ ID NO: 1041006 - DNA, 120 bp, Artificial Sequence
  ENSG00000224404_41 (sequence is synthesized)
catcttaacttcattacatctgcaaagaccttatttccaagtaaatccacattcatatgcattgggcattagaactttgacacatcctttttgggggaggtggggaacaactcaacccac

SEQ ID NO: 1041007 - DNA, 120 bp, Artificial Sequence
  ENSG00000224404_42 (sequence is synthesized)
acacagccacagacatttcctacaataccctattctatcgtctccatactgcttctcagtatgtgacattatcctatttatttataagtgtatgtgctcattgcctgcccaacccttccc

SEQ ID NO: 1041008 - DNA, 120 bp, Artificial Sequence
  ENSG00000224405_0 (sequence is synthesized)
tcttctctcttcctccttcggctcctgttggccggtgccttcctgaacctgaagaatatctttgctctttccaactcccacattcaaaacagagtcttacaactcagccacattttctgc

SEQ ID NO: 1041009 - DNA, 120 bp, Artificial Sequence
  ENSG00000224405_1 (sequence is synthesized)
tgagccagccagtgggaacaaacaccaagagacctggagccacagaaacactcatacatgagccaagaagaaaaaaattgtgtggcagctgcccagctctgctctgcaaccatgcgcttc

SEQ ID NO: 1041010 - DNA, 120 bp, Artificial Sequence
  ENSG00000224405_2 (sequence is synthesized)
gaggggaaagaattgctcccctcagcccatggggataaatttaggaccatcactggccagccttatgtccttgcctgaggagttggaactgggaaccaaaagggaaagttcacctgactt

SEQ ID NO: 1041011 - DNA, 120 bp, Artificial Sequence
  ENSG00000224405_3 (sequence is synthesized)
ggaaacgtgcacacaagcagtctctcaacactgtgacgtttatagtgaaggaagcatcaccgaagagagttgcgtttcattcggatggcctggccataataaactgtcctgaatggaaca

SEQ ID NO: 1041012 - DNA, 120 bp, Artificial Sequence
  ENSG00000273771_0 (sequence is synthesized)
gctggaattcaaatctcagggctcctgctctgggcttcttctccatgaaacttggaggaaaagaaaaaggaagacactcttactggtcagaggagagaacacaattccttcagtggaacc

SEQ ID NO: 1041013 - DNA, 120 bp, Artificial Sequence
  ENSG00000273771_1 (sequence is synthesized)
agtaattcaagctactgcatatgccaattaaagaccaatctggggaaaggtggatgccctgggctccatctgccattcaaccactgattacggccttgtacggatggactttcagcagca

SEQ ID NO: 1041014 - DNA, 120 bp, Artificial Sequence
  ENSG00000273771_2 (sequence is synthesized)
ggaacccaaaatcattggtgaaataggaaagctattgtacagatattagaaaaataagaccttcacagtcatcagaaaagttatcacttaatgtcatgtgtcatcagtcctttcttgtga

SEQ ID NO: 1041015 - DNA, 120 bp, Artificial Sequence
  ENSG00000273771_3 (sequence is synthesized)
ttgattatgtttgtatacatgcacttgaaatgtgtttttaaaagagtattataagagatatttttccagtaagtacaataagcattcaatagtagaacaaatagaacattgatatctcat

SEQ ID NO: 1041016 - DNA, 120 bp, Artificial Sequence
  ENSG00000273771_4 (sequence is synthesized)
tattagtattgctcacatgtgtattatgaggcagaattaaagctgaaatgcaataagagccatattttatcataatagatatttttcattttctgaaataatataataaaataatgtggt

SEQ ID NO: 1041017 - DNA, 120 bp, Artificial Sequence
  ENSG00000273771_5 (sequence is synthesized)
tggttaaagtatgtacacacaggctatcaattaagatgttttaaatttaattaaatattaaataataaaagccacaaggggaagtaagggaagtaagacaattctttctttaacatacaa

SEQ ID NO: 1041018 - DNA, 120 bp, Artificial Sequence
  ENSG00000273771_6 (sequence is synthesized)
cacatttaaatgttttctgataattatagaaatatcaaaatcagatcaatcttcatacctcagaaaattaaatgattaaatactggagactattaaaacaaataaaactgtttattccac

SEQ ID NO: 1041019 - DNA, 120 bp, Artificial Sequence
  ENSG00000273771_7 (sequence is synthesized)
aactttgcacagctaaaaaaaaatcttctatcatgtctagaaacatgtttctgacatatgcacacctcaccagcatatctcaggttattatacacctccaaccacagcctcacggtggca

SEQ ID NO: 1041020 - DNA, 120 bp, Artificial Sequence
  ENSG00000273771_8 (sequence is synthesized)
ggcagtcagtaagatggaccccagtgatccctgcctcctggtattcacagtctagggtaatctccttcccttgagtgtgagcctgtggcttacttctaaccaataagagtacagcaaaag

SEQ ID NO: 1041021 - DNA, 120 bp, Artificial Sequence
  ENSG00000273771_9 (sequence is synthesized)
caatgggatgtcaattctgtgagtatgtaaaattgtaacttccatcttgcaagccaactctcttctttgctggctttcatgacgcaatataccatgttggaggggctcgcgtggcgaaga

SEQ ID NO: 1041022 - DNA, 120 bp, Artificial Sequence
  ENSG00000273771_10 (sequence is synthesized)
actgagaggcctgtaggaacaaagtccaatagccaggtaggaaggagtccctcagtcccacaacccaaggaaactgaattctgtcaactaacacgcatgtaagtgagcttggaagtgact

SEQ ID NO: 1041023 - DNA, 120 bp, Artificial Sequence
  ENSG00000273771_11 (sequence is synthesized)
actttttgattgcagcttgtgacagaccctgaagcaaaggactcagctaagttgtgtcctaattcctccactgtgagaaaataaatgtgtgttttttaaaatgctaaatttgtggtaatt

SEQ ID NO: 1041024 - DNA, 120 bp, Artificial Sequence
  ENSG00000273771_12 (sequence is synthesized)
tcttattcagtaatagatagctaatacatgcgtgtacatacaaacacacgcacacacactgtatttggctttcacactgaggagaacacagttagtaggcccttttcatgtggcttttaa

SEQ ID NO: 1041025 - DNA, 120 bp, Artificial Sequence
  ENSG00000273771_13 (sequence is synthesized)
ggaggcataattacttttcttcgtctgtgatccacctttgtgttcttcaggttcttttccaggcctttgccccgagtgtgtgggggaccaaagggacgtcatgctatatggatggtattg

SEQ ID NO: 1041026 - DNA, 120 bp, Artificial Sequence
  ENSG00000273771_14 (sequence is synthesized)
caaattcatatccttggatctgaaagtagtcctagaacatatcctaaggagatcatctatcaagattagagaatttccttcatgatgttgtttatcgtggcaaaactaggaacaacctga

SEQ ID NO: 1041027 - DNA, 120 bp, Artificial Sequence
  ENSG00000273771_15 (sequence is synthesized)
ataccagtccctccaagaagctattgaataatatgggtatccctgttcaggaaaaatgcaaacaaaccactaaaaagagtaaaataatctttattgatatgaaaagatgtttaatgttta

SEQ ID NO: 1041028 - DNA, 120 bp, Artificial Sequence
  ENSG00000273771_16 (sequence is synthesized)
tctcattaaaaactagtttaaaatccactcttattccatgcttgtattatagataatatatatgtagttttttttaagtagaaaaatttctggaaaaacacttattaaaatgctatttgt

SEQ ID NO: 1041029 - DNA, 120 bp, Artificial Sequence
  ENSG00000273771_17 (sequence is synthesized)
gaaaaacacttattaaaatgctatttgttttctatgaatagagtaaaaccagataagtgaaagaaaatacccgtgttttctatattttctacgatgtttattcctgaatagatgtttcaa

SEQ ID NO: 1041030 - DNA, 120 bp, Artificial Sequence
  ENSG00000273771_18 (sequence is synthesized)
ggctttcattatgttcatagattaattgaagtgaatggaaactgtttcttagacaacctaaaatatatcccaattccaaagtccaggtctgtcttcattgcttcgagtgcagttgtatga

SEQ ID NO: 1041031 - DNA, 120 bp, Artificial Sequence
  ENSG00000273771_19 (sequence is synthesized)
aatacttctcagtgaggccaaatttcttaataatgattaattccagtttcatttttcaccctcttcattccatttgagaagagtagtggaaaggagtatggtaccataccccacacttta

SEQ ID NO: 1041032 - DNA, 120 bp, Artificial Sequence
  ENSG00000273771_20 (sequence is synthesized)
gacctatggtcttgtagaacttcttagggatctactttgataaaaatttaatttgctggttacatcagatgatgtcacacagttaatgagcattctctcctatgctgtaccttctctgtt

SEQ ID NO: 1041033 - DNA, 120 bp, Artificial Sequence
  ENSG00000273771_21 (sequence is synthesized)
ctactaatatagctatggtcaatttttctatcatggagaagaatctgtggataactcctactatttttctggaagtaaaaatttaactgttatgtcgtagaaaattcaaatatatatgat

SEQ ID NO: 1041034 - DNA, 120 bp, Artificial Sequence
  ENSG00000273771_22 (sequence is synthesized)
tcctttgtataaactatgtacacatatgattaatccattgattaacacctgttttcagtaatgttaatgccatcttgatcataacatttaattaaaaggtgacaaatgttagttaagtaa

SEQ ID NO: 1041035 - DNA, 120 bp, Artificial Sequence
  ENSG00000224409_0 (sequence is synthesized)
gctgtgtggggcagtctgggagaggagcgcctctgccactgtaacaactagcctttgctggactgcctcgcccactccagctggggtgcttcacttctgtgattgcctttaatgctccga

SEQ ID NO: 1041036 - DNA, 120 bp, Artificial Sequence
  ENSG00000224409_1 (sequence is synthesized)
cacaggttcaaagtccctgggttggggacactgacggggctggacatggccagggattccaccaggggctttaagagtcatggaattgccgggcgctgtggctcacacctgtaatcccag

SEQ ID NO: 1041037 - DNA, 77 bp, Artificial Sequence
  ENSG00000224409_2 (sequence is synthesized)
cttgagaccagcctagacaacaacgtgagaccctgtctctacaaagaaataaaattagctgggtgtggtggtgcaca

SEQ ID NO: 1041038 - DNA, 120 bp, Artificial Sequence
  ENSG00000268288_0 (sequence is synthesized)
tccaccccctattctgttgttatttcttgccatttgggaaattctttcaaattcttttactttttccttacattttatataaacaactacaaatagagatgaaaacaagtaccttttata

SEQ ID NO: 1041039 - DNA, 120 bp, Artificial Sequence
  ENSG00000268288_1 (sequence is synthesized)
acaacgaggcagcatcttctcccggagagtgatccggtacttgtaacagtaaaggtaataggcgtatggtgaccagatcgggtagaggtagttacgtgtttttcccctcttgatataaga

SEQ ID NO: 1041040 - DNA, 120 bp, Artificial Sequence
  ENSG00000268288_2 (sequence is synthesized)
gcagtttttcagttcagtgcctccctgtggcaaagtgaagttcacaggtgggtggcagaggtttaggcaacctggtggcattgtgacccagtgggcactatgacatggataaggggtcag

SEQ ID NO: 1041041 - DNA, 120 bp, Artificial Sequence
  ENSG00000268288_3 (sequence is synthesized)
cccttatgtcacctcaggactccactctgctgcttatctaccctaatcccttatccaaggctcatattcgactagtatgcatgttatggctgtatgaatgattaaaaaatagaacttgaa

SEQ ID NO: 1041042 - DNA, 120 bp, Artificial Sequence
  ENSG00000268287_0 (sequence is synthesized)
ttctgcacatacctggagtggctgcctgccctggctcctcggtacaggaaaggggaagggtggagagtgaaaggagcccaggctgacccaaccaggaccgccttctccctcagaccgagt

SEQ ID NO: 1041043 - DNA, 120 bp, Artificial Sequence
  ENSG00000268287_1 (sequence is synthesized)
agtgcagaccccagggcctccaccttcagacccaggagttcagatccccagcgccctcctccctcagacccaggagtagtccaggcccccagcgccctcctctctcagacccagaagtcc

SEQ ID NO: 1041044 - DNA, 120 bp, Artificial Sequence
  ENSG00000268287_2 (sequence is synthesized)
agtccatgcccccagcgcccttctccctcagacccaggaatccaggcccccagtgccctcctctctcagacccaggagttctggaattcaggcccctccttctcggatactaagaaatgc

SEQ ID NO: 1041045 - DNA, 120 bp, Artificial Sequence
  ENSG00000268287_3 (sequence is synthesized)
agactccgggttcctcatcctccagatttgggttgggggttccggactccgagacccctcaggggaaaccggctgcatatctgggacacttccctcttgcctcagtttcctccgccaagc

SEQ ID NO: 1041046 - DNA, 120 bp, Artificial Sequence
  ENSG00000233553_0 (sequence is synthesized)
agttgtgaatgctgaagcccgcgttggagggagcttgcccctccagttcatgtcctggctgcccctggaattcggcactggagaggttgggtgggatgtgcagaacaaacaggacttcct

SEQ ID NO: 1041047 - DNA, 120 bp, Artificial Sequence
  ENSG00000233553_1 (sequence is synthesized)
gcttgagcaagtccggacatcagagctggagatggggactgagaccacaatcagctgtgcaccctgtggtcagggaagaaactcactggagtctcatttgactgagaaagcttctttcaa

SEQ ID NO: 1041048 - DNA, 120 bp, Artificial Sequence
  ENSG00000233553_2 (sequence is synthesized)
aggaaatgcaactgtcttaagactgcctccccagggatctcattaaacagctgggaaagatcaacctccagagaagagaagagactggaggcagccaccaagcccagactttccccctgt

SEQ ID NO: 1041049 - DNA, 120 bp, Artificial Sequence
  ENSG00000233553_3 (sequence is synthesized)
gcagctcccggaggttacctgggagacttcgtctgcagccaagacaaccttcactcccacataccctccctggagcatgggactgagcaaccccactcctcctttctgtgaggagggcat

SEQ ID NO: 1041050 - DNA, 120 bp, Artificial Sequence
  ENSG00000233553_4 (sequence is synthesized)
tcgggcctcagccatctggaccctctgagttcacatttcccaagacctccatgaacacatgtgagtgtaataaatgttctctgcttctctcttgttaacatgtgtttctgctgtaggggt

SEQ ID NO: 1041051 - DNA, 120 bp, Artificial Sequence
  ENSG00000233553_5 (sequence is synthesized)
gtcagctgtggccctttttcatggggaacaaagggatcatcctgagcttcctgatgtgtacagaaagcacagagttcaagggggaagattcagaggatcacaggtgaatccggtcatctg

SEQ ID NO: 1041052 - DNA, 120 bp, Artificial Sequence
  ENSG00000233553_6 (sequence is synthesized)
gaaactcctgtgagcatctccaacagcagagacacacgtagactcctgcaaacccagctcagctgccatcctcccttggcagccaaaggtctcagaaaggcacgtttccaaaacttggtt

SEQ ID NO: 1041053 - DNA, 120 bp, Artificial Sequence
  ENSG00000233554_0 (sequence is synthesized)
ggaggactgcccgatggcggcggcactgttcgagccgccctgcagcggtgtggagactccgaccagttggggcaggcggctcaggtcgcggccagccaggggttgggaaactagtttcca

SEQ ID NO: 1041054 - DNA, 120 bp, Artificial Sequence
  ENSG00000233554_1 (sequence is synthesized)
tggccaaacctagcccaccgtctgttttggtgtccatggattggcggggacagctctgcttaaggatgtagtagctctgcaggttggctagtttcctgttcttcccaacctgcgctatgg

SEQ ID NO: 1041055 - DNA, 120 bp, Artificial Sequence
  ENSG00000233554_2 (sequence is synthesized)
acttcatcagatttcagcatcagagagaatatggaaggacatcgaccctaacttcatccagtgaggatttccacacaccatacactctctgagagttctcttggctttgtgtgcacacct

SEQ ID NO: 1041056 - DNA, 120 bp, Artificial Sequence
  ENSG00000233554_3 (sequence is synthesized)
ccagtgacagggagctcgctatgtcatgaggcagcctgctcccttgtggctatcactgaaccaactattaagccttcttatacaaacagtccctgacttactgttagacttacaactttt

SEQ ID NO: 1041057 - DNA, 120 bp, Artificial Sequence
  ENSG00000233554_4 (sequence is synthesized)
tgattttacagtggtgcaaaagcaatatgcattccatagaaactgtatttcaaattttgaattttgatcttttccaggctagcaacatatgaagaccaaccttctatttttaaaataggc

SEQ ID NO: 1041058 - DNA, 120 bp, Artificial Sequence
  ENSG00000233554_5 (sequence is synthesized)
tttgtgttagatgcttttgcccaactataggttaatgtaaatgttctgagaatatttgaggaaggctaggctaaactgtgatctttgggagcttagatatgttaagtgcattttcaactt

SEQ ID NO: 1041059 - DNA, 120 bp, Artificial Sequence
  ENSG00000233554_6 (sequence is synthesized)
acaatattttcaacttacgatgagtttattgggatgaagcccgttgtaagtaaaggagcatctgcattaagctaaaatccatgtctataacttcctcagtaatatcaagtttgttccttg

SEQ ID NO: 1041060 - DNA, 120 bp, Artificial Sequence
  ENSG00000233554_7 (sequence is synthesized)
gagccagagaataaactgaatccttttccacgtgatggtctttctgttgtttaaagagatcagccatgtaccttctcccaacctgaagacaactcctcaccaggctacctatcaattcta

SEQ ID NO: 1041061 - DNA, 84 bp, Artificial Sequence
  ENSG00000233554_8 (sequence is synthesized)
acctgaagacaactcctcaccaggctacctatcaattctacctccctggtcttgaactctgggctcaagtgatcctcccacctc

SEQ ID NO: 1041062 - DNA, 120 bp, Artificial Sequence
  ENSG00000233554_9 (sequence is synthesized)
gcccagctccatttccattgttcttcatgcttccttattgagttccttccctgtcccgattattcgtctttgattgggctttgactacctgggcatttagtagggtccataactgaatgc

SEQ ID NO: 1041063 - DNA, 120 bp, Artificial Sequence
  ENSG00000233554_10 (sequence is synthesized)
agcattccagccggggtctaagcaacagaatagagcaggaccatcatctccgcaatttccaatatcatactttcatcaatgtcttccgaaacaacattcacttttttatgttcatgttaa

SEQ ID NO: 1041064 - DNA, 120 bp, Artificial Sequence
  ENSG00000233554_11 (sequence is synthesized)
actaaaagacagggctgaaggcagcatcctggaacagtggaaacattcctataagttgacttgaatcctttaaataaagtccatgtaccaaccagagtttttgactattaaaacagtcaa

SEQ ID NO: 1041065 - DNA, 120 bp, Artificial Sequence
  ENSG00000233554_12 (sequence is synthesized)
ttataacactgctctgccgtggccaccattgcccatgattatttaacaccactgctacaggaccgttcatgctgctgctgcctccatgaataatttcgacaccattcctgcctcttagcg

SEQ ID NO: 1041066 - DNA, 120 bp, Artificial Sequence
  ENSG00000233554_13 (sequence is synthesized)
tcactcctaagaattcagagtctgcagtgggaatgaccgagccaattcacatgcttgagccctagctgctaggtaggggaggaacgaatcttcccctttctgcctccatggtgggagcta

SEQ ID NO: 1041067 - DNA, 120 bp, Artificial Sequence
  ENSG00000233554_14 (sequence is synthesized)
gggcattgagccctccagtactatatacactggaaaattttccaaaataagatgggggattgcctgttgagtgacaagtataatggcaaaggttcattccagtcatttaaaaaagttcaa

SEQ ID NO: 1041068 - DNA, 120 bp, Artificial Sequence
  ENSG00000233554_15 (sequence is synthesized)
attttcctttttagtcacaggaataacatgccatagattgttaaaggccgacccagtttgccaacagactatcaaatgcagcactgtgatctggcagtttagggacctgttaaaaaaaga

SEQ ID NO: 1041069 - DNA, 120 bp, Artificial Sequence
  ENSG00000233554_16 (sequence is synthesized)
agggacctgttaaaaaaagaaatgtgatagtctttgctctggcttgttctgagaaatctccacttcctttacatctttaaaagtctatccttggccaggcacaatggctcacgcctgtaa

SEQ ID NO: 1041070 - DNA, 90 bp, Artificial Sequence
  ENSG00000233554_17 (sequence is synthesized)
ttaaaaataaaaaaaattagccaggcgtggtggtggtatgtgtctgtagtcacaactactcatgaggctgaggtgagaggattgcctaag

SEQ ID NO: 1041071 - DNA, 120 bp, Artificial Sequence
  ENSG00000233554_18 (sequence is synthesized)
gtggtggtggtatgtgtctgtagtcacaactactcatgaggctgaggtgagaggattgcctaagcccaggaggttgaggtggcagtgagatgtgattgcaccactgcattccagcctggg

SEQ ID NO: 1041072 - DNA, 120 bp, Artificial Sequence
  ENSG00000233554_19 (sequence is synthesized)
acacacacacacacacacacacaaactattcttagataagagtgtagtttgcagaatcaacgtcttcctgtaatggacaggtattgattttttgtgcctcctcttcaacattactccttc

SEQ ID NO: 1041073 - DNA, 120 bp, Artificial Sequence
  ENSG00000233554_20 (sequence is synthesized)
cattactccttctgttagagactcccactcttccctatgtggttgggacaggctaactacggggtcgctatggcctgggtgacttatatctggccaatcagagcactatacccctctggc

SEQ ID NO: 1041074 - DNA, 120 bp, Artificial Sequence
  ENSG00000233554_21 (sequence is synthesized)
cacagttgatttgttcaaggatcaacatgtggcccaagaaggactaatgagcaatgtcccttcttctcccaggacttctgctgcaaatgttgagtaaaaggcttttcctttcctctggaa

SEQ ID NO: 1041075 - DNA, 120 bp, Artificial Sequence
  ENSG00000233554_22 (sequence is synthesized)
tggccagtctggagtagcaagggtgctgtattagtttccaaggactcctctaacaaattatccagacttggtggcttcaaacaacagaaattgattctcttacagttctggaggctaaaa

SEQ ID NO: 1041076 - DNA, 82 bp, Artificial Sequence
  ENSG00000233554_23 (sequence is synthesized)
acaacagaaattgattctcttacagttctggaggctaaaagtccaaaatatcaaggtgtcagcagggacaggcttcataggg

SEQ ID NO: 1041077 - DNA, 87 bp, Artificial Sequence
  ENSG00000233554_24 (sequence is synthesized)
tgtgtacgctccttctgaaaactctaagaaagaattctttcttgcctcttctagcttctggtggctcgcagccatccttggcattcc

SEQ ID NO: 1041078 - DNA, 120 bp, Artificial Sequence
  ENSG00000233554_25 (sequence is synthesized)
cttctagcttctggtggctcgcagccatccttggcattccttggcttgtagcagcatcattctattctctgccctcatcttcacatggccttctctctgcctatgattttctcctgttga

SEQ ID NO: 1041079 - DNA, 120 bp, Artificial Sequence
  ENSG00000233554_26 (sequence is synthesized)
tgtgtcctctcctcttataaggaaaccagtcattggacttgggctcaccctaatccagtatgaccccatcttggcttaactaattgcatctgcaaagactatttccaaataagctcaatt

SEQ ID NO: 1041080 - DNA, 120 bp, Artificial Sequence
  ENSG00000233554_27 (sequence is synthesized)
ctgaggtttcggatagaaatgaattttggaggtacgctgtccatctcattacagccattatatggaaagagcctatctgagaaataagccaaaaaggaagctagagggttacgccctggt

SEQ ID NO: 1041081 - DNA, 120 bp, Artificial Sequence
  ENSG00000233554_28 (sequence is synthesized)
atgctgtatcagactccccctggactgaccagttatgtaacctggtgaattactcctcccttttttccccccataagctgatttgaagtaacagaaggaaactgattaccactcctcctt

SEQ ID NO: 1041082 - DNA, 120 bp, Artificial Sequence
  ENSG00000233554_29 (sequence is synthesized)
ttgcaaaattaaaaaatcatttacacaggactaatgttccaaacttctccccgctatattcatcctccaaaagtctctgacaaggattgagcaatttcatttggaaattctcttagtgcc

SEQ ID NO: 1041083 - DNA, 120 bp, Artificial Sequence
  ENSG00000233554_30 (sequence is synthesized)
ttggatttacttcatttggctaggaaactaacttattttgacaagcgagatgatctcttacaatgtcttcagccattccttataatttttattgtggaaaattttaaaaatatacaaaaa

SEQ ID NO: 1041084 - DNA, 120 bp, Artificial Sequence
  ENSG00000235257_0 (sequence is synthesized)
gatgcctgaaactgcgatagtaccaaactctgtatatactatgtttttccctatacatacatatctatgataaagtttaatttataaactaggcacagtaatagagtaacacaataataa

SEQ ID NO: 1041085 - DNA, 120 bp, Artificial Sequence
  ENSG00000235257_1 (sequence is synthesized)
aatagaacaattataacaatacgccagcgtcgcttctcttctgctttggggccactattcattcaagtaagggtgacttgaacccaagcaccataataccactgcagtcgagctgttaac

SEQ ID NO: 1041086 - DNA, 120 bp, Artificial Sequence
  ENSG00000235257_2 (sequence is synthesized)
tggctgattcacatcccaggtgggacggagcaggatgtgtaagatttcattacgctactcaaaacggcatgcaacttaacacttacaaaatatttatttctggaattttccatttaatat

SEQ ID NO: 1041087 - DNA, 120 bp, Artificial Sequence
  ENSG00000235257_3 (sequence is synthesized)
aagcgaaaccgtggataagcaggggaactgtggcatcccatttaaaattgcttctgaagagaagcatgaggttacatctgtaatctccctgcagcagagtcaactgcataagaaaccaaa

SEQ ID NO: 1041088 - DNA, 120 bp, Artificial Sequence
  ENSG00000235257_4 (sequence is synthesized)
agacacacctgctccatgccaggttagtacccacccatcaccctcataattttgccaaaactttagatatgtttgtgagtattagccaagtatgtgtattaaaaatctgtcttcccagaa

SEQ ID NO: 1041089 - DNA, 120 bp, Artificial Sequence
  ENSG00000235257_5 (sequence is synthesized)
ccggggaccggcctccgccgcgggctctgcccgctcgcctgctcgcctggtgggggagaggggagcggggccgacacagggttcctgaccaagctggtgcttctgcgtgtgttcctgcat

SEQ ID NO: 1041090 - DNA, 120 bp, Artificial Sequence
  ENSG00000235257_6 (sequence is synthesized)
agagaagcatgaggttacatctgtaatctccctgcagcagagtcaactgcataagaaaccaaaagacacacctgctccatgccagcctaagccaccacataaaaagtcagaccatctgct

SEQ ID NO: 1041091 - DNA, 120 bp, Artificial Sequence
  ENSG00000235257_7 (sequence is synthesized)
ggccctgagtcaacatggagaggaagaaggacttgactgaatccagccttccagctgtccctaccaaggtgccaggcatgagaatgaagctgtcttgaactctgaagaccagcttagcca

SEQ ID NO: 1041092 - DNA, 120 bp, Artificial Sequence
  ENSG00000235257_8 (sequence is synthesized)
ccaggtaaatgccactaagtgacctcactcaatgtcatgtgggacggaagaatcaccccgccaaacccttcctggatccctgacccagaaatttgtcagatgtaatggttgtgaaaagcc

SEQ ID NO: 1041093 - DNA, 120 bp, Artificial Sequence
  ENSG00000235257_9 (sequence is synthesized)
attcaatttgggggcagtttgtatgcagcatagctagctggtatgatacaacagcctgcaattcaggcagcagcagcactaacaacgatgaaatcctgcaggagcgaactcctttggggt

SEQ ID NO: 1041094 - DNA, 120 bp, Artificial Sequence
  ENSG00000235257_10 (sequence is synthesized)
cccacaaaccagaggctgtctcagcaggaaggagttggagttggagaaaaaggagaattaagaatctatctggcgatgtggattaaataaacaacaaattggcagattgtttttaaaagg

SEQ ID NO: 1041095 - DNA, 120 bp, Artificial Sequence
  ENSG00000235257_11 (sequence is synthesized)
tgttctgaaaaattgagaagatgatctatcttcacttcaaaaagaaatctctaaggagcaagtggacacagcctgcctcccataagctgtctggctcactcattttattcctggaaatca

SEQ ID NO: 1041096 - DNA, 120 bp, Artificial Sequence
  ENSG00000235257_12 (sequence is synthesized)
gaagtcaatcatttcctgagaaatgaggaaaaagatggaggtcacagagaccagtaagagcaaggagggagaggaaaaagctgaacatgaaactcgaggaagaaacagaatatgcagagg

SEQ ID NO: 1041097 - DNA, 120 bp, Artificial Sequence
  ENSG00000235257_13 (sequence is synthesized)
aataaaaaaagctgacggaaaactcaacaagtggggacctcccctgaaatgataggaaagaatttaacctcatggcataaaaacaactcatgaatggtgtttggatgaaaaggttatgcg

SEQ ID NO: 1041098 - DNA, 120 bp, Artificial Sequence
  ENSG00000235257_14 (sequence is synthesized)
ggagtcaaatgtttgaaggggctcaggtacttactaaaatcctggccagaaatcttcatagaaatgtactcatggtgaagagttccttctcacctgcaaacccccttctactctgctcat

SEQ ID NO: 1041099 - DNA, 120 bp, Artificial Sequence
  ENSG00000235257_15 (sequence is synthesized)
tcaaaactggtttgcaacttgaagctgtcaaggtcttgctactcaaagtgtggtccctggacatgctcactgttagaaatgcagattctcaggccccaccctagacctgatgagttagaa

SEQ ID NO: 1041100 - DNA, 120 bp, Artificial Sequence
  ENSG00000235257_16 (sequence is synthesized)
gctaacctctgcgaacatggacatttgagaagcactgctccatgtcactgagccctccctggaggaaacatgatattcaccccacgaagaccaccttcctcatgatgccctctgccctcc

SEQ ID NO: 1041101 - DNA, 120 bp, Artificial Sequence
  ENSG00000235257_17 (sequence is synthesized)
agaaaaataacatatacactgcccatgttatttgagagatatttcctgtgtgagtatacacttttctggaactgaagacctgtctattcacacggcccttatctgagcagactttgggac

SEQ ID NO: 1041102 - DNA, 120 bp, Artificial Sequence
  ENSG00000235257_18 (sequence is synthesized)
aagcattggggtgcaattagtttgtatgggcagtgatctcagggagctccaggagagggtagtgaagtgtgtcatcaacgggtgagaaagctggggcatctatccatctcaccggtctct

SEQ ID NO: 1041103 - DNA, 120 bp, Artificial Sequence
  ENSG00000235257_19 (sequence is synthesized)
ccttggtagaaaactgtactggggacgttaactatcctgcacttccagccctcctgactcgggtgcagcacactcctgtagccagagaaagttcctaaccagagaaacagttcgcctatg

SEQ ID NO: 1041104 - DNA, 120 bp, Artificial Sequence
  ENSG00000235257_20 (sequence is synthesized)
gcgaactgtcataggcggcctccagggtgggtggaggggacatggagggtgttgacagcatctctcccacatcctctccctctgcacaagcaactgggctggtggagctgtggactgaga

SEQ ID NO: 1041105 - DNA, 120 bp, Artificial Sequence
  ENSG00000235257_21 (sequence is synthesized)
agatgaagggatggggcctgagaggacctcttcctagtctagcaccttcagagtgtatctccacagatcaacctgtcagctcatggagccctgtctcagggggcagcagcttactaatct

SEQ ID NO: 1041106 - DNA, 120 bp, Artificial Sequence
  ENSG00000235257_22 (sequence is synthesized)
cttccctcgggttggcacatccactttgctactcctgggtacatctcaggactcttcttaaagaactggtatccacttctaggatgatccttcctccctttctctttgttgcttcaacag

SEQ ID NO: 1041107 - DNA, 120 bp, Artificial Sequence
  ENSG00000235257_23 (sequence is synthesized)
gtcagctccaatctcctcttacctagaccagcacaaaacggcctcctggtggatgccttgcacacacctctctcccctgatatgttctgcaaactgccacagatgaatcccaatatgaca

SEQ ID NO: 1041108 - DNA, 120 bp, Artificial Sequence
  ENSG00000235257_24 (sequence is synthesized)
ctttgtttttgctaaaaagccttcaaaggttgttaacaagcaacattcttcattggttcttaactgggggtgtgcactggaaccacctgggagccagagatgccacacccagctgtgcag

SEQ ID NO: 1041109 - DNA, 120 bp, Artificial Sequence
  ENSG00000235257_25 (sequence is synthesized)
gctgatcactgcatagaagacctggctgctctcaccaagcccttcaccttggcatgagtctctccaatttgcataacagtgctggaaaggtgacgatgacaatcctatgaaaagctttgt

SEQ ID NO: 1041110 - DNA, 120 bp, Artificial Sequence
  ENSG00000235257_26 (sequence is synthesized)
aaaaaagacccagatgcaggcccctctgtgtggccgcagaattaatgcatgtggcgtcggcatgcatttgctgaaagctccccaggtggttctgatggacaatcaagttaaaaaccctca

SEQ ID NO: 1041111 - DNA, 120 bp, Artificial Sequence
  ENSG00000235257_27 (sequence is synthesized)
aaagtgaaactgcattgaaattctctggtgggcttgttaaagatgcagattgcaggccccagcctccagagtgggattctttacagcagaagcagagtcaggaaacctggatcttgaatc

SEQ ID NO: 1041112 - DNA, 120 bp, Artificial Sequence
  ENSG00000235257_28 (sequence is synthesized)
atctgaggcaagtgttctacactagcctttgaaacactggtcccaagagctaatgtagccactgccatttttgaagttaagagattgagacctagagtatgtgagaaaaaaaatgccttc

SEQ ID NO: 1041113 - DNA, 120 bp, Artificial Sequence
  ENSG00000235257_29 (sequence is synthesized)
tctgggattcttatgctggtgaggactgaggaaccctggtattatggtcctctctgtctttgagtcagttgtctggagcctcctatgtcatgtgcctctggggcagggactcagagaaat

SEQ ID NO: 1041114 - DNA, 120 bp, Artificial Sequence
  ENSG00000235257_30 (sequence is synthesized)
gaactctgcagaccatggctggctccaacatgggtgcctacctgctgtgctcccagaggaagcccatctactcgttcaacaagtgtttcttattttgtctcaaatgggaaacagcttcta

SEQ ID NO: 1041115 - DNA, 120 bp, Artificial Sequence
  ENSG00000235257_31 (sequence is synthesized)
cacaataattctcatgtgtgagacacgtatgttttctgttacatcttacattcctttgttcatgctctcatttaataattactgagtagcctcagtgtcctttgttgggccatatgcctt

SEQ ID NO: 1041116 - DNA, 120 bp, Artificial Sequence
  ENSG00000235257_32 (sequence is synthesized)
tgtaacacagttcctgctgtctccaaggagaagttcccagcctaggaggaagaagaagaactggttcaaggaaagacacttatcatctcacatgatgaatgcatgggggtgctgttgcac

SEQ ID NO: 1041117 - DNA, 120 bp, Artificial Sequence
  ENSG00000235257_33 (sequence is synthesized)
caggggctgaaactggcctccctttaccagagaagcattggctgtccccattcccaccccacaggtcgtattttacagctcattgttattaccattgttttacctttcaactaactaaaa

SEQ ID NO: 1041118 - DNA, 120 bp, Artificial Sequence
  ENSG00000235257_34 (sequence is synthesized)
ctgggaaacgtccttcttaattgatccttgtcgtaactacagctctgttgacatttctaaagcaaaacatagccttccttccaaacgcagtgaatacacaaatgaagcttttcatatacg

SEQ ID NO: 1041119 - DNA, 120 bp, Artificial Sequence
  ENSG00000235257_35 (sequence is synthesized)
tgaaagctgagccccgcggcggaatactgaagccgccttgtgatttgaaatggacatctgcgtttctccaccacttcctcactgccgactgccgcaggaagcgcccagcctgtctcccag

SEQ ID NO: 1041120 - DNA, 120 bp, Artificial Sequence
  ENSG00000235257_36 (sequence is synthesized)
cctgatgcaagggccacaggtaatccaggtgaggaaatacaaacacaggctgggggtgcctgctccccgccaccttctcttgtcctctcaaggaggaagggaagggcctgcagaagcaac

SEQ ID NO: 1041121 - DNA, 120 bp, Artificial Sequence
  ENSG00000235257_37 (sequence is synthesized)
tgagaaacactgaagggtctctgaggaatgccgagtttccatctgataagcggatggggaagaccaacaaagcaagataaagagcttgctgttgtgttagagcctcgagtgggcttccag

SEQ ID NO: 1041122 - DNA, 120 bp, Artificial Sequence
  ENSG00000235257_38 (sequence is synthesized)
ccaggtgaggcttttctacctggcgttatacaggaagttcaaggtaaagtcaccagggggcttggggcactggattaaagacaggaagggggcggaaaagacttattattttctaagtat

SEQ ID NO: 1041123 - DNA, 120 bp, Artificial Sequence
  ENSG00000235257_39 (sequence is synthesized)
cggcatccaccctcagggctctcttaccagggcaagcagcaagttcattcatcatcttaatggccaggccaagatgactataaacatctaagggttgaattttacttgaggctactatta

SEQ ID NO: 1041124 - DNA, 120 bp, Artificial Sequence
  ENSG00000235257_40 (sequence is synthesized)
acttgacaagagacaccagagaaagcagaacacaatgaaaatcagtccctgcgctgaatgaaagcggcagtgaaggaaggctgtaatctgtcccagcactgagggatgaggctcacttct

SEQ ID NO: 1041125 - DNA, 120 bp, Artificial Sequence
  ENSG00000235257_41 (sequence is synthesized)
gcctaagaaccattctgttgctcaatgcttggtttcccggctgtaacacaatttgctttgttctcctgcccagatgcagtttctgtatggaaccttctgtctaaaaacaggccaaagcac

SEQ ID NO: 1041126 - DNA, 120 bp, Artificial Sequence
  ENSG00000235257_42 (sequence is synthesized)
ccatgtcctcatctgtggaacctgtgaatgttatgtggccagggggaattaaggttgctaatcaagcgacctcaaaataaagagggtatcttgaattatccaggtgagcacattgtactc

SEQ ID NO: 1041127 - DNA, 120 bp, Artificial Sequence
  ENSG00000235257_43 (sequence is synthesized)
acaagagtccttatatagggaagaggcagaagtcagatcagaaagagaacatcctaagacttgaccagccattgctggctttgaagatggaagggggccatgagccaaagaatgcaggca

SEQ ID NO: 1041128 - DNA, 120 bp, Artificial Sequence
  ENSG00000235257_44 (sequence is synthesized)
gcccttagaggctggcaaaggcaagaagtggattttcccctggtgcctctggcaagaacacaggccctgatactttggttttagcccagcggggcccattttggacttctgttcttcaga

SEQ ID NO: 1041129 - DNA, 120 bp, Artificial Sequence
  ENSG00000235257_45 (sequence is synthesized)
gaggcaaaatgtccctgaagtgttctctggggaacctccagcaccttgcacagtgcctgacacacagcaggggcctcataaatggctgttaataagtgataaaacccacccaagactgct

SEQ ID NO: 1041130 - DNA, 120 bp, Artificial Sequence
  ENSG00000235257_46 (sequence is synthesized)
tttcttgctgcttttgataaaactcataagcgaactctgagtgacagctgctttctttgcctcgtcctgctccctgtagctacctctgtgcctccatcccacagttagatgcaacatccc

SEQ ID NO: 1041131 - DNA, 120 bp, Artificial Sequence
  ENSG00000235257_47 (sequence is synthesized)
tgatttccaggatcagcttagttcatgccattgacccttgatttttttggtctattcccatgttcaccaggaagagaagcatgaggttacatctgtaatctccctgcagcagagtcaact

SEQ ID NO: 1041132 - DNA, 120 bp, Artificial Sequence
  ENSG00000235257_48 (sequence is synthesized)
gaaagaagcccatctgaaaggcagaaagaaagagaagctgagttagaagtgctgaagaatcagccattgtgaccccaaggcagtctgtccctggcctaagccaccacataaaaagtcaga

SEQ ID NO: 1041133 - DNA, 120 bp, Artificial Sequence
  ENSG00000235257_49 (sequence is synthesized)
tcccggcccggggaccggcctccgccgcgggctctgcccgctcgcctgctcgcctggtgggggagaggggagcggggccgacacaggactgcagttgacagcagataactgaaagctcgg

SEQ ID NO: 1041134 - DNA, 120 bp, Artificial Sequence
  ENSG00000235257_50 (sequence is synthesized)
ataactgtggaagtgctacaaaggagaagttcatgatgataaaagatcctcatgatagaggcatgggagtgaacagagttccctgaggagccatttgagctgaaggtgaaaggacaagca

SEQ ID NO: 1041135 - DNA, 120 bp, Artificial Sequence
  ENSG00000235257_51 (sequence is synthesized)
gaagtttaccagctaaacaagggagggaagatcattccaaggagagggaacatgatgtgcaaaccccctttggcatgagtgaacttggcaagggtgagacactgccattggacagtgaac

SEQ ID NO: 1041136 - DNA, 120 bp, Artificial Sequence
  ENSG00000235257_52 (sequence is synthesized)
tggagccaacaggatgaacaagaagcagcgggaagatgttcatgatatgctggagagacaggagctggaggctgcagtaagatctccatgctttaccttaagaggaatgagaagccactg

SEQ ID NO: 1041137 - DNA, 120 bp, Artificial Sequence
  ENSG00000235257_53 (sequence is synthesized)
gaggattttgagcagggcagtgatgtgatttgcattttgcaaagtacactgcaaaatgaatctaggtcagaagagataactgaatgtgggagtacaaggaaaaagcccccgtgagagggc

SEQ ID NO: 1041138 - DNA, 120 bp, Artificial Sequence
  ENSG00000235257_54 (sequence is synthesized)
tgcgggggaaatggtttccccaggttagatccacgctttcagtaagaaaggaggtggtgtgaaaggagaagattgactgaggaggaggagaagtctgctggttttgggggagtggctgtg

SEQ ID NO: 1041139 - DNA, 120 bp, Artificial Sequence
  ENSG00000235257_55 (sequence is synthesized)
agggtcgtagcaggctgagctggggaaggcaggagctctggccagtgaagggatggctgatggcctggtgcggaccctggctggagggctcacacactggacgctgactaacaaaacaga

SEQ ID NO: 1041140 - DNA, 120 bp, Artificial Sequence
  ENSG00000235257_56 (sequence is synthesized)
cgaaaatggggagtatgaggatctgtctcaagggggcctttgaggagggcaaacaggcctttgagacaggtccagacactggcaccctgcctgcttctgtagaatttaacgtacctgagg

SEQ ID NO: 1041141 - DNA, 120 bp, Artificial Sequence
  ENSG00000235257_57 (sequence is synthesized)
ttgccaagctggtgtcatggagtggccagaagccagcttccagtctgaggcagtgggtgaacctaaaccacactatttgattcacttctgtgtttctggaaacttttatgttctgatcaa

SEQ ID NO: 1041142 - DNA, 120 bp, Artificial Sequence
  ENSG00000235257_58 (sequence is synthesized)
aatatgcctactgtaacagctggcaatgcccatgtctccacaaggcctgagaatatgatcacaatggcagtacatctcacccaggcttctgctggatggagggcttccagagacggaggg

SEQ ID NO: 1041143 - DNA, 120 bp, Artificial Sequence
  ENSG00000235257_59 (sequence is synthesized)
acagctcggtcaataccatccaagaggaggttcaactccagacctaggccagctgaaggtcaatgacaagggcaagatgctctctgcagtcaacatcacacacttgtctcaatagaagga

SEQ ID NO: 1041144 - DNA, 120 bp, Artificial Sequence
  ENSG00000235257_60 (sequence is synthesized)
aggaatttatataaaataagaagtggaaagagaataacatctgtgacagtgagatgacatttccacccgattctgattccatctaatagccagtgcaggtgtgggggagggaggagggag

SEQ ID NO: 1041145 - DNA, 120 bp, Artificial Sequence
  ENSG00000235257_61 (sequence is synthesized)
acagggtggttggggctggaataaatgttttcagcagaaccatgcctcagatggctctcagaactcagcctagaaggcaagccagttcagaggcacagggagacttatggagacgacata

SEQ ID NO: 1041146 - DNA, 120 bp, Artificial Sequence
  ENSG00000235257_62 (sequence is synthesized)
aatgaacagaaaataaactgtacatttggcaagactggcactgtaagtctgtgctgtgatgaacagagatgtcaaacatgccccatgcctgccaggtgtcatgtttccaaaatccctttc

SEQ ID NO: 1041147 - DNA, 120 bp, Artificial Sequence
  ENSG00000235257_63 (sequence is synthesized)
tctgtcagagtttgcagaggaatgagctgggctttctaattcctgttactggtaatggatcacatttgtagagtacttactatgcaccaggcaccatgctgagaggtttactatctacta

SEQ ID NO: 1041148 - DNA, 120 bp, Artificial Sequence
  ENSG00000235257_64 (sequence is synthesized)
ctccccataatcctcacattgctcttgagagagagagggatggagctcatttacctcaagcgatggagaatcccgaggagtcttcattctccccttgactgcacatctgtgcatctagtt

SEQ ID NO: 1041149 - DNA, 120 bp, Artificial Sequence
  ENSG00000235257_65 (sequence is synthesized)
aaggaccaggacacaatgggaagagttccaaagccaactgaccaccaaataagtctgagcatgatgtgctcctgaggccattagagccaagggtcactcctaagacagagggtcagctgt

SEQ ID NO: 1041150 - DNA, 120 bp, Artificial Sequence
  ENSG00000235257_66 (sequence is synthesized)
ctaccacccaggaatgcgattcctcccacctgctctgtgtgtgggctctgggctacaggacagcacaggccagaggggtaaggggtcaagggagactcagggctcgccaacaggcagagc

SEQ ID NO: 1041151 - DNA, 120 bp, Artificial Sequence
  ENSG00000235257_67 (sequence is synthesized)
tgtggccagaaattcctcttccactgaccggctgtggggcatccagcaggctccttcactcccggagcctctgttccaaagaagatggaagttgtagtgcctagttcacaggggtgatgt

SEQ ID NO: 1041152 - DNA, 120 bp, Artificial Sequence
  ENSG00000235257_68 (sequence is synthesized)
cagagtgacaggaggtaatcatagcacatgcctagcacttcacaggaattcagcagattcgagcacacctcacacaatgaggtcattcatcttaatgggacatggacacgcacactgagc

SEQ ID NO: 1041153 - DNA, 120 bp, Artificial Sequence
  ENSG00000235257_69 (sequence is synthesized)
acagcacccaagctctgagtgcagaacatttccatctgtggccaagactcggttctctgcccagatccttttgggtcccctctcttgatttggcctgcccagcccccaggtttgtcatgc

SEQ ID NO: 1041154 - DNA, 120 bp, Artificial Sequence
  ENSG00000235257_70 (sequence is synthesized)
cttcacttctagaggcctgcctcacttttagagggtaaagtggcttggggttactacctctggaacagccccaaccaatgactggcagatacaggagtgtgagaccccagctcccctgct

SEQ ID NO: 1041155 - DNA, 120 bp, Artificial Sequence
  ENSG00000235257_71 (sequence is synthesized)
tccaggcaggaccaactccgaggtcaagatcagggtggagctaagatggtccctgaaatctcacccttgcttcccttctcctctttcctatcctgtcccatttatttctgggtctcatta

SEQ ID NO: 1041156 - DNA, 120 bp, Artificial Sequence
  ENSG00000235257_72 (sequence is synthesized)
gcgcgcgcacttcaggccttgcgggcatgtccagctcttctgtggcttccagcaggcgaggccaaacaggatctttctcacttccccacatctcctggatcctggagctgatgcagtcag

SEQ ID NO: 1041157 - DNA, 120 bp, Artificial Sequence
  ENSG00000235257_73 (sequence is synthesized)
gtcccgtgctcaccgggggaaccggcgagcctctccaaagtattaaaggacacttccggaagagcctttggcctgtggtcagcccgcagacatcggtggtctctgtacctgtaggagccc

SEQ ID NO: 1041158 - DNA, 120 bp, Artificial Sequence
  ENSG00000235257_74 (sequence is synthesized)
catgagggtccaggtgtgggagacagtcctgggacagggcttctgcggccgaggttcctgaccaagctggtgcttctgcgtgtgttcctgcatgacttgactgcagttgacagcagataa

SEQ ID NO: 1041159 - DNA, 120 bp, Artificial Sequence
  ENSG00000235257_75 (sequence is synthesized)
gggcgggtgggtgtgtcccggcccggggaccggcctccgccgcgggctctgcccgctcgcctgctcgcctggtgggggagaggggagcggggccgacacaggcctaagccaccacataaa

SEQ ID NO: 1041160 - DNA, 120 bp, Artificial Sequence
  ENSG00000235257_76 (sequence is synthesized)
tcgccccctactcatcactccctgaaaggtaagtagagttgggttgaagatgaaattcaacatgtaattggcacctcgcaaccagcactttgattctgcagtcacacaggtctcacatgg

SEQ ID NO: 1041161 - DNA, 120 bp, Artificial Sequence
  ENSG00000235257_77 (sequence is synthesized)
tagagaaaacactggcaagaaaaacatcctgtggagacatttttcaaaatgcatggacttcctgcgggtgatattacgtaagctgtttgttccttctaaaatgcatctggtgtagtgttt

SEQ ID NO: 1041162 - DNA, 120 bp, Artificial Sequence
  ENSG00000235257_78 (sequence is synthesized)
taaaatgcatctggtgtagtgttttccagactgtgtgctggggaataccagttactgagagctgttcaaaggtgtttgggagtaaaaaaaggtttcatggctgggcgcagtggctcacgc

SEQ ID NO: 1041163 - DNA, 120 bp, Artificial Sequence
  ENSG00000235257_79 (sequence is synthesized)
tccagtatcaggggactggatgagtagactgcagacactctacagctttaagatgtgctggaaacgtgctttgaacaatatggaaagatgttcacagtactgtcttcagggaaaaatagg

SEQ ID NO: 1041164 - DNA, 85 bp, Artificial Sequence
  ENSG00000235257_80 (sequence is synthesized)
tggaaagatgttcacagtactgtcttcagggaaaaataggtatacgtttttcccagattaataaatcaaatccaggccaggtgcg

SEQ ID NO: 1041165 - DNA, 120 bp, Artificial Sequence
  ENSG00000235257_81 (sequence is synthesized)
ggtgggaggatagctggaggccaggagttcaggaccagtatgagaaacatagtgagaccctatgtttacaaaaaaataaaaaaatgagccaggcattgtgcatgcctgtagtcccagcta

SEQ ID NO: 1041166 - DNA, 120 bp, Artificial Sequence
  ENSG00000235257_82 (sequence is synthesized)
ggagttagagctatgattgtgccactgccttccagcctgggtgacagaacaagaccccatacttaaaaaaaaaaaggaacccactgcttttaaatttagaggtacttcacctgaaaatat

SEQ ID NO: 1041167 - DNA, 120 bp, Artificial Sequence
  ENSG00000235257_83 (sequence is synthesized)
gctgagtatattactgtaaaatttaactaatacactattcaaaaataagttgatgttatgagaatgcctggtctatatctatatatgcagagaaaaaggtcaaaatgaggcaatactatg

SEQ ID NO: 1041168 - DNA, 120 bp, Artificial Sequence
  ENSG00000235257_84 (sequence is synthesized)
gaactcctggtgttttacaactttttttggtaattgatatgttatgttaggtcaatacatacatattattttgtaatcccaaagaaattagttgtcttattttaaaatatccatctataa

SEQ ID NO: 1041169 - DNA, 120 bp, Artificial Sequence
  ENSG00000235257_85 (sequence is synthesized)
tactctaagaggctgttttcacctacatctgaaatttgtaattctagagaagtatggactttggtgtcaggaagttgcagttatggtccctggtgctgttttggagctggggacacagtg

SEQ ID NO: 1041170 - DNA, 120 bp, Artificial Sequence
  ENSG00000235257_86 (sequence is synthesized)
gaaacaaggaagagacagaccttcatcagctaaagcctccaataccattactgatgaatagagaggctctgaaggaaaaggactccgggtctctgaaaggagagtgtgaggcaaacaaat

SEQ ID NO: 1041171 - DNA, 120 bp, Artificial Sequence
  ENSG00000235257_87 (sequence is synthesized)
catcctagacatggggatgaggacacccctttctccttgagagagtgatgcttgaggcaggacaggtctgcaccctgggccacctccaaatgaaccaccatgaggttgggagaagttatg

SEQ ID NO: 1041172 - DNA, 120 bp, Artificial Sequence
  ENSG00000235257_88 (sequence is synthesized)
atgaagctactctggactgtagcccatctcagttactcaagttttctggtcagaaatcttcctcacattccttagaggaaaagaaggaagaattgttctatagttcgccttctgatcttt

SEQ ID NO: 1041173 - DNA, 120 bp, Artificial Sequence
  ENSG00000235257_89 (sequence is synthesized)
tttaagcaaatgggaaatcgcccccttctggcagttgctccccagacttctgttttggagttaggttctcaccatcctatgttagggctctaagggaaggtaagagaagagagaactgag

SEQ ID NO: 1041174 - DNA, 120 bp, Artificial Sequence
  ENSG00000235257_90 (sequence is synthesized)
acttttgccttcactctgaagtggtccaaatcctcagttgtgaatggcctcaaggggagccaagattccactccctgcctgaagggtcactgtccttcactgtaccggtgccatgaagga

SEQ ID NO: 1041175 - DNA, 120 bp, Artificial Sequence
  ENSG00000235257_91 (sequence is synthesized)
agctctaacaggatactccttcttccctggaaaggcaggagagctgggcatctatgagtggggaccccagggggacctgcaatcaccagactcaccttccagagcagcacggccagcagc

SEQ ID NO: 1041176 - DNA, 120 bp, Artificial Sequence
  ENSG00000235257_92 (sequence is synthesized)
aggaagatgaggattcccaccaacaaactgatggcgatgatccaccccacgacgtagccacggggctccagattgtgcagggcctcgaagaccacctaggaggcaacgcaacagtgaaaa

SEQ ID NO: 1041177 - DNA, 78 bp, Artificial Sequence
  ENSG00000235257_93 (sequence is synthesized)
tctcacaaagtgtgcttctctgggtggtgcaggctggtgcttcagttggacccaggtatctttctgtttggcttcctt

SEQ ID NO: 1041178 - DNA, 64 bp, Artificial Sequence
  ENSG00000235257_94 (sequence is synthesized)
gcccaggctggagtgcagtgggccaacctcggctcactgcaacttccacctcctggattcgatc

SEQ ID NO: 1041179 - DNA, 73 bp, Artificial Sequence
  ENSG00000235257_95 (sequence is synthesized)
tactgtgccgccagcttccttctttttctgatcattttccttcacgtgtttcaggaagctatcttggctctta

SEQ ID NO: 1041180 - DNA, 120 bp, Artificial Sequence
  ENSG00000235257_96 (sequence is synthesized)
cttagagtgcttaatgtgctcaatacgtacattaattttcttggcaagaatcttgcccttaacttgtgtgtttataacaatgccaacagcatgctgggtaacaccgtagactctttcagt

SEQ ID NO: 1041181 - DNA, 120 bp, Artificial Sequence
  ENSG00000235257_97 (sequence is synthesized)
ttgcccttaacttgtgtgtttataacaatgccaacagcatgctgggtaacaccgtagactctttcagtttagccatggtaatacttgcggggccttcctttttgaacagtacccattccc

SEQ ID NO: 1041182 - DNA, 120 bp, Artificial Sequence
  ENSG00000235257_98 (sequence is synthesized)
ttgcatacacgtggccaaaaaaacaactccatgttttctaaaaagcctagagaacatatatcaggtgcctttcctctttccctttgtgttcgacattttggcgaattactggaagatggt

SEQ ID NO: 1041183 - DNA, 120 bp, Artificial Sequence
  ENSG00000235257_99 (sequence is synthesized)
ggttctggccaaaaggccgaaatttcttttgggggtgattgaaatgttccaaaattttgcaacaacaaggacggaactggaggtcattatgctaagtaaaataagccttgggaggcaggc

SEQ ID NO: 1041184 - DNA, 120 bp, Artificial Sequence
  ENSG00000235257_100 (sequence is synthesized)
atgtttgagaccagctgggcaacgtggtgaaaccccgtatctaaaacccgaccccctctccacaaaaaaaattagctaggcgtggtggtgtgtaactctagtcccagctactcaggaggc

SEQ ID NO: 1041185 - DNA, 120 bp, Artificial Sequence
  ENSG00000235257_101 (sequence is synthesized)
gtaatttgttacagcagcaataagaaattaatacaagaagctatgtcaatgggttaaggatttttcttttttctttttttttttaaacagtccagaggtctttcattttttagacaccta

SEQ ID NO: 1041186 - DNA, 120 bp, Artificial Sequence
  ENSG00000235257_102 (sequence is synthesized)
gtgagttttttagaatgactgtccaatagaaggaaaaaagtaagctagggaggtcagtagctactgctcattgcagcaggccaagggtggtttgctgacaatgtccatgacatgtagtta

SEQ ID NO: 1041187 - DNA, 120 bp, Artificial Sequence
  ENSG00000235257_103 (sequence is synthesized)
gactctagtatcaaacagggagcttggccttctccatgcctaagtcagcaggtaggaaggttcaggtctacagcacacacacgatgtacccaagaagagtgattaatttacaaactgaca

SEQ ID NO: 1041188 - DNA, 120 bp, Artificial Sequence
  ENSG00000235257_104 (sequence is synthesized)
actggaatggaacatcatgagggatgttaacatctgagctggcatctcgggaggagtgacctgttctacattcaacattcacatgcgtctggttttcagtccacatgacccagagggcag

SEQ ID NO: 1041189 - DNA, 120 bp, Artificial Sequence
  ENSG00000235257_105 (sequence is synthesized)
caatgccagaaattactgtcaccatcacacaatgttttctgaacctccaccctgtgggctgtgtcctcttcaactctcggctcagatattcacctgctccatatgggccttgctgccctg

SEQ ID NO: 1041190 - DNA, 120 bp, Artificial Sequence
  ENSG00000235257_106 (sequence is synthesized)
attttcaagctatctatggaaaaactgtccctttggctgaatgtccttcacgtgcccctatagagagcaatgctttcacaatcctctcaacatggactgcaggcactttccctgtgcaaa

SEQ ID NO: 1041191 - DNA, 120 bp, Artificial Sequence
  ENSG00000235257_107 (sequence is synthesized)
atgcactcagcaaaatgcattcagacgcatgcaactgcagatgctgctgggggttcccagagccagcgaagtccatcccaggagctggttcgtaattaactcttccccatctccaaagag

SEQ ID NO: 1041192 - DNA, 120 bp, Artificial Sequence
  ENSG00000235257_108 (sequence is synthesized)
gtcttcttacagcattaaccaaatggtctcaatgtagaaattcaggtatcacaggtcccctggcctctccagatatgtctccaaagggtagaatgagttgaattttccaaaccctcaagg

SEQ ID NO: 1041193 - DNA, 120 bp, Artificial Sequence
  ENSG00000235257_109 (sequence is synthesized)
tggatgtcagggtagggtggaatacaaaatttgaatgggctggctcaaagctgaaagcaatagtgaaaacaaatggagaactcaccaccatttcctggacatgaaacatctctgcaccac

SEQ ID NO: 1041194 - DNA, 120 bp, Artificial Sequence
  ENSG00000235257_110 (sequence is synthesized)
gacagatgaccctggaagggtgcttgggccagtgttgtagacctgtgggtgtggaacacacacagcaagtctcagtggaaaatagcagacctccatttcctgtcatgcaatatatattct

SEQ ID NO: 1041195 - DNA, 120 bp, Artificial Sequence
  ENSG00000235257_111 (sequence is synthesized)
aagattctttgaaatcacatacagaaactctaaggttcggatctggaaggtcacaacttgaagtaaagtgaactactgaatgacgggaaatttcaacaaaatagaaacacttctaacatg

SEQ ID NO: 1041196 - DNA, 120 bp, Artificial Sequence
  ENSG00000235257_112 (sequence is synthesized)
catctaaaaatctcaaactttgaaactaccatattctctttcagcattttgtcttcttcctgctaaaacttttctttttacatgcataggaatttactcatagactattacacttggtga

SEQ ID NO: 1041197 - DNA, 120 bp, Artificial Sequence
  ENSG00000235257_113 (sequence is synthesized)
gaactcagacatcataatctagtccagtggttctcaaatttcagcaaaacatcagaaccatctgaggggcttgttaaaacacattttggtgggggggtatggagtgggggtcatgccgag

SEQ ID NO: 1041198 - DNA, 120 bp, Artificial Sequence
  ENSG00000235257_114 (sequence is synthesized)
tttctgactcagtaggtctagggtggggctggcagattcatatttataacatggtcccaggagatgctgctgctgctggtccaggaaccaccacttgagacccacagatctggtccaacc

SEQ ID NO: 1041199 - DNA, 120 bp, Artificial Sequence
  ENSG00000235257_115 (sequence is synthesized)
tctttcctttgccagtttgaggtaactgaggccctcaaggaccaagtgggtcatcccaaaaccaagcgatcgaatatacagaaagggctgtttttactacatgagccagctgatttggtt

SEQ ID NO: 1041200 - DNA, 120 bp, Artificial Sequence
  ENSG00000235257_116 (sequence is synthesized)
gacccacattgggccaggtggattctctccctcccaactcccttcctcccttccacagttgatgggagtagacatttgactagagctgggccaggcagatcctctctcccagatatgtgg

SEQ ID NO: 1041201 - DNA, 120 bp, Artificial Sequence
  ENSG00000235257_117 (sequence is synthesized)
gaccaggaatcagaggtggctgatcattctgcgtctgtggctagtagtccttgagatgcaagtttggaggggctggaggcaactatctccctacgatgtgtagggaaacatagagaaagc

SEQ ID NO: 1041202 - DNA, 120 bp, Artificial Sequence
  ENSG00000235257_118 (sequence is synthesized)
tggtctgcggtgggaagagaatgatgcggatgtgtagccaagtagagagaaggggcttccttctgttgaccttccttctgctgggtgggggcgacagggagtgaggcaagcccagccttg

SEQ ID NO: 1041203 - DNA, 120 bp, Artificial Sequence
  ENSG00000235257_119 (sequence is synthesized)
tctcctagcctcctctaagcaccactcactcagaaagcccaacaccaagctcctcctcttgccaaactaattcgcatcttgccttccccaccctgattaagggcacccatcctttgtctg

SEQ ID NO: 1041204 - DNA, 120 bp, Artificial Sequence
  ENSG00000235257_120 (sequence is synthesized)
aacttatcttaaggagagacagctattctttttttctccctgacctctcaagtccaactggtcagcaaaccctgcctgtcctaccttgacccatggcaatggccctactcttgcccccac

SEQ ID NO: 1041205 - DNA, 120 bp, Artificial Sequence
  ENSG00000235257_121 (sequence is synthesized)
actgtccctagatctctctttccttttagagacagggtcttgctctaccacctggtgcagtggtatgatcatagctcactgcaacttcaaattcttaggctcaagtaaacctctggcctt

SEQ ID NO: 1041206 - DNA, 120 bp, Artificial Sequence
  ENSG00000235257_122 (sequence is synthesized)
aggcatgagccactgcacccagccccagatctctctctcgacacagatctggtcatgccaccgctctgctcacagacctcccatgctccccctttgtcctggttagcagtggccttcaca

SEQ ID NO: 1041207 - DNA, 120 bp, Artificial Sequence
  ENSG00000235257_123 (sequence is synthesized)
tcctggttagcagtggccttcacaactgtggcagacggtcttgctgcaggtcagtgactgccctgacaaactttacaagctgctctccacaaaccctgcttattttcccacctcttcctt

SEQ ID NO: 1041208 - DNA, 120 bp, Artificial Sequence
  ENSG00000235257_124 (sequence is synthesized)
atctacccttccctgcctggaaaactcaaaccacactaaaggtcagactcgaatgacacctcatttatgaaatatcccctggcttctgtgtgctaagcgcagtgctaaacattttccttg

SEQ ID NO: 1041209 - DNA, 120 bp, Artificial Sequence
  ENSG00000235257_125 (sequence is synthesized)
cataacctctacataccaaactggaggtgatggtctcctttttacagaggaagaaactgagggtcacagaaggtaagcagcccccttaaggcctcatgtcaggcaagtgtgagagtcagg

SEQ ID NO: 1041210 - DNA, 120 bp, Artificial Sequence
  ENSG00000235257_126 (sequence is synthesized)
attgctgcccacagctgtcagcctgaaagctgctctcatctaccacactgttctctgtgaccttttaatcctccctcctccttgggggcaagggagggggactcatggcaccttcttctc

SEQ ID NO: 1041211 - DNA, 120 bp, Artificial Sequence
  ENSG00000235257_127 (sequence is synthesized)
agtttccagagcagttactgcgcagcactcaccaccctccattatgcctgcaggtctattgctaggtggtgaggcggtcaagtgcagggaagggcacagttattgctgcatcccagtgcc

SEQ ID NO: 1041212 - DNA, 120 bp, Artificial Sequence
  ENSG00000235257_128 (sequence is synthesized)
tagtccaggcaaagcaaggactggggcaaagtaagcgttcgagaaatgtgagccgaaatgagatactgctctgggttgactagcaaagctgttgtgacccaggtggcctcattcaacagc

SEQ ID NO: 1041213 - DNA, 120 bp, Artificial Sequence
  ENSG00000235257_129 (sequence is synthesized)
ctcctcaaagctttcctgccacccgttagttacggcaagccctggtctgggcacacggtgtgtccctggcggccgtgactgccctctccctcccagtctgtggcagagggcagagtctgc

SEQ ID NO: 1041214 - DNA, 120 bp, Artificial Sequence
  ENSG00000235257_130 (sequence is synthesized)
cttctcaggtcctggctctttggatcccacacagctgggtgacctcagggttctccccacccatgacagcatctcctgcaaccatgcttttttaaacaaacacagcaaaagcaaggcaaa

SEQ ID NO: 1041215 - DNA, 120 bp, Artificial Sequence
  ENSG00000235257_131 (sequence is synthesized)
gcaggtggtgggctggaggaggcaggggctgtgcagaggagacaggacacccctgagaggcagagccaggtggggcggccagaaggagggcatgcagactataaggggaagtggggcacg

SEQ ID NO: 1041216 - DNA, 120 bp, Artificial Sequence
  ENSG00000235257_132 (sequence is synthesized)
gccacaacactccccactctgtgccctgtctggttccacacacccagccataaaggacacagctcctctcattttaagagcccatataaaggcagaaggaagtcacatacacacacacac

SEQ ID NO: 1041217 - DNA, 120 bp, Artificial Sequence
  ENSG00000235257_133 (sequence is synthesized)
ctattggcaaacagacatttctgatacactgcttgtgggagggtgaattggtatgacctttctacagggcaatctgcaatagtaataaaaggcttaggccgggcggggtggctcacacct

SEQ ID NO: 1041218 - DNA, 120 bp, Artificial Sequence
  ENSG00000235257_134 (sequence is synthesized)
gtctactagttatttaaattatggaatccaatactggactaccatagtcatactatgtaccataccagtgcttactttagtgggaaaattagctcatcatttgcacactgatatggtctg

SEQ ID NO: 1041219 - DNA, 120 bp, Artificial Sequence
  ENSG00000235257_135 (sequence is synthesized)
gatttgtgtccctacccaaatctcatgttgaatttaaggagggatctggtggaaggtgactggatcatggaggtggattttccccttattgttcttgtgatagtgagtgagttctcatga

SEQ ID NO: 1041220 - DNA, 120 bp, Artificial Sequence
  ENSG00000235257_136 (sequence is synthesized)
gatctgaaggtttaaaagtgtgtggcactcccccaccagcccccttctctcctgccaccatgtgaagaaggttcttgcttccgttcaccttctgccgtgattgtaagtttcctgaggcct

SEQ ID NO: 1041221 - DNA, 120 bp, Artificial Sequence
  ENSG00000235257_137 (sequence is synthesized)
cctagtcgtgcttcctgtgaagcctgtggaactgtcaatcagttaaacctctttcttcataaattgcccagtctcgggtagttcgttatagcagtgtgaaaacggactaatacaaacaca

SEQ ID NO: 1041222 - DNA, 120 bp, Artificial Sequence
  ENSG00000235257_138 (sequence is synthesized)
taggtcaaaagctattacaaatgacagtaacaaaaaacaccattcataaactgcctgatgtagctaagggtttacttattcagaacttcatcaggcttaaagactgtgaataggcctttg

SEQ ID NO: 1041223 - DNA, 120 bp, Artificial Sequence
  ENSG00000235257_139 (sequence is synthesized)
tggctgcagtagaacttctgttctgtcacgaacttattcaacagatagtgagctcatctactgtgccaggtgtggaggtatgtgagtatagccctgtcctcagaagcttttccattaaat

SEQ ID NO: 1041224 - DNA, 120 bp, Artificial Sequence
  ENSG00000235257_140 (sequence is synthesized)
atcagatgtaaagtaattgccttggcagttgatgtaacagagaaacatataccagcttagggctgaagctttaggaaatgcccacgaggacaggaaggagcacacaggctgtctcttagt

SEQ ID NO: 1041225 - DNA, 120 bp, Artificial Sequence
  ENSG00000235257_141 (sequence is synthesized)
gtgttctgatcatgcacacatcaaagaaaagcccgatgccaagaacctcggtgatcaatacgcaattagaacaagggcaagacagttttacaagagcactgaatgacggacctcctaata

SEQ ID NO: 1041226 - DNA, 120 bp, Artificial Sequence
  ENSG00000235257_142 (sequence is synthesized)
gaggcaatggatcacggaggagtttatctaagggacatgccaatcactcattccccagggctggattctctagcctgagtcctatttcaggtcagatgtgaagaaaactatttgcctgaa

SEQ ID NO: 1041227 - DNA, 120 bp, Artificial Sequence
  ENSG00000235257_143 (sequence is synthesized)
actttaaactcactgtaaaaattaccttcagagaaacaactggaaggataagctgcataccctcagatttctttcttttgttccccagagggtgataagaacatttggtatattctgtgc

SEQ ID NO: 1041228 - DNA, 120 bp, Artificial Sequence
  ENSG00000235257_144 (sequence is synthesized)
aacccctgttcttcttttccttctttcaacactcataccctcttcattacatggtctgtgttacttgaacccttctaaataattttctgaactacatctttaattgcaagacacccccaa

SEQ ID NO: 1041229 - DNA, 120 bp, Artificial Sequence
  ENSG00000235257_145 (sequence is synthesized)
aactataagagtaggaaagagtagaaacaactaagatgaaataaacccatcaggtctttatctatttcctacccaattacgaaaagcaaaggagaaaaataaaataactctgagaagcaa

SEQ ID NO: 1041230 - DNA, 120 bp, Artificial Sequence
  ENSG00000232200_0 (sequence is synthesized)
ctggggccacttgagggggtcttgtagaagaggaaaacttgtggcgcaatgggatgtccagggacacagatagccaggtgctgggcctcaggatggaatccagccacccctgctgggtga

SEQ ID NO: 1041231 - DNA, 120 bp, Artificial Sequence
  ENSG00000232200_1 (sequence is synthesized)
cacacagtgaccttcctcaggagagtggaagctctgcagggtgagaatgaaacatgggtggtcagtggggataataggacctacctagctgggctgttatgaaggctaaacgaggaaaca

SEQ ID NO: 1041232 - DNA, 120 bp, Artificial Sequence
  ENSG00000232200_2 (sequence is synthesized)
tgtaaagttctcagaactgtgcctcgaacaagtgggagatgtcagtcaccatcacccccattcaccaggacagaggggctacagaaaaagctgaactgtgctgagccatctgctgcctct

SEQ ID NO: 1041233 - DNA, 120 bp, Artificial Sequence
  ENSG00000232200_3 (sequence is synthesized)
tcccagtgacagcatctgaatctgaaagaaaaaaagaatgtcacatccatttgtcatggctcttgggaccctgactttatgcaggggtgctgggagctaagtaaaacacctcaagccagt

SEQ ID NO: 1041234 - DNA, 120 bp, Artificial Sequence
  ENSG00000232200_4 (sequence is synthesized)
aagtccccccgcaacacaccttagaaatataaaattgacttgctacagacttgtttctagacctgaactcacctgcagttcttggaaaagaaaattaaatgggtatgttattatttaaaa

SEQ ID NO: 1041235 - DNA, 84 bp, Artificial Sequence
  ENSG00000231953_0 (sequence is synthesized)
tctcctctgtttccaagcctttgttagttgagatttctgctgctaacggccaaagccattcctcactgctattgactttcccag

SEQ ID NO: 1041236 - DNA, 120 bp, Artificial Sequence
  ENSG00000231953_1 (sequence is synthesized)
tcacaaattcttgctaatatcattcaatcaatacctgctactacttgccccggagggagcaatttacagttgaccatgtgagaagctgcatctccaccaacctaaaaacatcaccccttg

SEQ ID NO: 1041237 - DNA, 120 bp, Artificial Sequence
  ENSG00000231953_2 (sequence is synthesized)
aattcagagctgctgcatttctacttgaagctcaagctcaagttctgttttctctgttcatctggatccactccagccacactggcctccttgctgcttctcaaaacacaccagcctcat

SEQ ID NO: 1041238 - DNA, 120 bp, Artificial Sequence
  ENSG00000231953_3 (sequence is synthesized)
tcctgtatctagttctatgtttttgttttgccatagcacttaaaacctttggacatagtatatcatttacttattcattatgtttctttttaatttgtttgtcttcccctgctagaaagt

SEQ ID NO: 1041239 - DNA, 120 bp, Artificial Sequence
  ENSG00000231953_4 (sequence is synthesized)
tcattgatatagccaaggttctaaagtacttcctagcatataatgggtgctcaaaatgaatgatttaattgatttattgatctttctctgcatgggcaatcacatgtgtctcttgggaat

SEQ ID NO: 1041240 - DNA, 120 bp, Artificial Sequence
  ENSG00000231953_5 (sequence is synthesized)
ctgttttggctgctttgtctttgtcttctcaaggcgccccctagaaatcatagccaagtgaattctgcagagaccacacagcctacatatcaagcagaccttccaaactcagtggaagtc

SEQ ID NO: 1041241 - DNA, 120 bp, Artificial Sequence
  ENSG00000231953_6 (sequence is synthesized)
aaactcagtggaagtcttttcacagtatggttacaaacagaaaccatagcagctttattgagatataattcacttaccttaaaacttacccttctaggggccgggcacagtggctcacgc

SEQ ID NO: 1041242 - DNA, 120 bp, Artificial Sequence
  ENSG00000231951_0 (sequence is synthesized)
acaaaaagcttcaagacacatagtttgttgggcttgtcccacatggtcgcataatctgctcatgtgtgaatttcacaaacgactcgtattgctctgctagtttggtattgaggattttct

SEQ ID NO: 1041243 - DNA, 120 bp, Artificial Sequence
  ENSG00000231951_1 (sequence is synthesized)
catactcctcccaaatcttctcttcatagtttgagagacgtgtacatattgttctagcttgccggagggccaaggtgggctggtccatcttcacccaggagaaacctgcagcactgggtg

SEQ ID NO: 1041244 - DNA, 120 bp, Artificial Sequence
  ENSG00000231951_2 (sequence is synthesized)
ggctcggcgtcccagggcctggggcccggagccgggcggggaagcggggagtggcgcggccgctttggggaaccaggctcagcagcgtcgcctcgagctccgtgggctgcttcggtgtcg

SEQ ID NO: 1041245 - DNA, 120 bp, Artificial Sequence
  ENSG00000231951_3 (sequence is synthesized)
ccccgctcgccatgtggccggggaccgggaggggacgcggcagtagttgcgtcccaacctccggactcctcagcggggctctcaagcccagtaggctccaatccgttgagttcctgtttt

SEQ ID NO: 1041246 - DNA, 120 bp, Artificial Sequence
  ENSG00000231955_0 (sequence is synthesized)
ttttttttttttttaacgaagaagtgagtattttattattttgctgtacagctgttgcttcactatataaaaacagcaccagcaaatgcagtgtattgcaaaattaagatagtgttgttc

SEQ ID NO: 1041247 - DNA, 120 bp, Artificial Sequence
  ENSG00000231955_1 (sequence is synthesized)
ttcatctgacactgtacaagcaacaaaaacttcttcactcccagttatttccaatggaaagatcattaagtatttcatcccaagtccaggtatggacatacacaagttacaatattatat

SEQ ID NO: 1041248 - DNA, 120 bp, Artificial Sequence
  ENSG00000231955_2 (sequence is synthesized)
aaggcttaagaataacaacattatctttgaattatgtaatttttgtaactaatttttaccatggataatttcatggataatttcatgaatactagagcctagtctaaaaatcataggatg

SEQ ID NO: 1041249 - DNA, 120 bp, Artificial Sequence
  ENSG00000231955_3 (sequence is synthesized)
ttgtgaaaaagacacatattatgtttatctacaatcattagaaagttaaaaggcatcttctttcattagcagtgttaacagtagtttttttttcccatgggtaatgctaaaagttgctat

SEQ ID NO: 1041250 - DNA, 120 bp, Artificial Sequence
  ENSG00000231955_4 (sequence is synthesized)
tctaagtcttctatccaccactaatttaggacaactctgctgggttgcgttatttcatactagcttatttagtggttccattttcactcctcaatagattttatgtatttctcatatgct

SEQ ID NO: 1041251 - DNA, 120 bp, Artificial Sequence
  ENSG00000231955_5 (sequence is synthesized)
ctggattttctgcaagagcttcattaatttcggttacttctcctgataaaggagaatagagttcactagcagctttcacactctccaaagcaccaaactcatcttgtttgttcaattttg

SEQ ID NO: 1041252 - DNA, 120 bp, Artificial Sequence
  ENSG00000231955_6 (sequence is synthesized)
tcccaacttcaggcagattacagtaaccagacggcgcccatcccaagctgccagggcctcgataggcagggcgcggcaggtgccaggaccacgtgcaggctgcagagcacggcccgcacg

SEQ ID NO: 1041253 - DNA, 120 bp, Artificial Sequence
  ENSG00000231955_7 (sequence is synthesized)
ctccgcaccactcgcagcgccatgttcccaggggtgcggggatggcagcgctacgcctcagccactcgcgcggggaggcggggcggtgtgggcagaagtaaatttctttataaattaccc

SEQ ID NO: 1041254 - DNA, 120 bp, Artificial Sequence
  ENSG00000231955_8 (sequence is synthesized)
agtctgggcctggtgtgttggctcacatgtgtaattccagaactttgggaggtcaaggtgggaggagcgcctgggcccaggggttcaagacgagcctgggcaacatagtgagacctgtct

SEQ ID NO: 1041255 - DNA, 120 bp, Artificial Sequence
  ENSG00000231955_9 (sequence is synthesized)
ctataaaatatttttaaaaattagctgggcgcggtgacaaattttgtgcaattttaagttttacatttttttgtacaaataggatcttgctatgcagtccaggctggtcttgaactcctg

SEQ ID NO: 1041256 - DNA, 120 bp, Artificial Sequence
  ENSG00000231955_10 (sequence is synthesized)
gcctcaactgatcttcctgccttgaacccccaaaatgctgggcttacaggtgtgagccactgcacctgctgtttttaaagatattgtaacatactattattctaaaaccttatcctttgt

SEQ ID NO: 1041257 - DNA, 120 bp, Artificial Sequence
  ENSG00000276693_0 (sequence is synthesized)
atgcccctagcctggaccaagaactcgcagactggcctggtggcttctgagcacacacaactgaggtcaattttatgctctggaattgatttcaaattaaattttgtttctttcgaccca

SEQ ID NO: 1041258 - DNA, 120 bp, Artificial Sequence
  ENSG00000230082_0 (sequence is synthesized)
aggtctgtcgcgagcaaccctacaccatgcaccagcgccactgctcccagcaggagtgggttttgcagcggtggcggcagccccgcgcccaggccgagcagagtcagggctgccagcgcc

SEQ ID NO: 1041259 - DNA, 120 bp, Artificial Sequence
  ENSG00000230082_1 (sequence is synthesized)
gtaagcagcaaggggaagggcaggttgtagagcaccaggcccccgcgaacgcccagccgcgcctgcgagccgtaagggtcgtgtggttggcaagtcatttaacttttccaaacaaatctg

SEQ ID NO: 1041260 - DNA, 120 bp, Artificial Sequence
  ENSG00000230082_2 (sequence is synthesized)
cagcacctgcctcattgcgttgtgaagaagatgaaatgtttagcccggtgcccaacacccagttctcactctgtcatccaggctggtgtgcagtggtgcaatgtgggcttactgcagcct

SEQ ID NO: 1041261 - DNA, 120 bp, Artificial Sequence
  ENSG00000230082_3 (sequence is synthesized)
tcagcctccggaatagctgggactacagctcaacaacgcccctctgaaagtaggactcttggaaatgaaccttgttgggagtaaagctgaaccttcacctctcctttccaggattctact

SEQ ID NO: 1041262 - DNA, 120 bp, Artificial Sequence
  ENSG00000230082_4 (sequence is synthesized)
cttcacctctcctttccaggattctactccattcatacggcctcacactgaattaatgtttctagcagccacattactttgttacccaattgatctagtagtaaagtcttcccatctctt

SEQ ID NO: 1041263 - DNA, 120 bp, Artificial Sequence
  ENSG00000269420_0 (sequence is synthesized)
atgcacagaagttacgcacattggatcaggccacacagctgcaaacatttattgagggccactatttgcccaggaaacccagatgagcaggaagacacgcgctcggggctggagacgtgc

SEQ ID NO: 1041264 - DNA, 120 bp, Artificial Sequence
  ENSG00000269420_1 (sequence is synthesized)
gcccttctcgattacctcgaaaggatctccggcactgaagtcgaaggagaggatgaggtgaacctcccgcgtcgggggcagcacgagtgggaagggagtgttgatggctaaaccagcatc

SEQ ID NO: 1041265 - DNA, 120 bp, Artificial Sequence
  ENSG00000269420_2 (sequence is synthesized)
caccaggtggaggtgcttccggctgctcattatcttgtcccggatgccacctgtggtgcccaggaagaaagaggatcagctgcttctggggactgaaagcaagacttggaaatggaaggc

SEQ ID NO: 1041266 - DNA, 120 bp, Artificial Sequence
  ENSG00000269420_3 (sequence is synthesized)
ggaaaccgacatgcacagaagttacgcacattggatcaggccacacagctggaaacccagatgagcaggaagacacgcgctcggggctggagacgtgcacacccggggaaggaggtgcac

SEQ ID NO: 1041267 - DNA, 120 bp, Artificial Sequence
  ENSG00000269420_4 (sequence is synthesized)
ccccaagaaagggttcttggatctcatacaagaaagaattcaggaatgactagtgctcttctaagaagaggggattagaacagagacacacatggagcaaagaccatacgaggatatgag

SEQ ID NO: 1041268 - DNA, 120 bp, Artificial Sequence
  ENSG00000269420_5 (sequence is synthesized)
aaggtggctgtctgcaaatcacagagagagtcctcagaaagaactcaccccacagacaacttgattttggacttccagccttgagaactgtgagaaaataaatgtctgtcgtttaagtca

SEQ ID NO: 1041269 - DNA, 120 bp, Artificial Sequence
  ENSG00000269427_0 (sequence is synthesized)
ttagttttattccacatttaatgtacgtaaaagggtgtttttgtaaatgcaaagattaaatcagacagcctctgaattgtagtcttgaaaacattagcaagttcttttaggtccagggta

SEQ ID NO: 1041270 - DNA, 120 bp, Artificial Sequence
  ENSG00000269427_1 (sequence is synthesized)
gcacgagataattcctcttgctgtgatggttcgtcctcaatgacaggtcccttatagtatttaggtacaacaaggtcttttgtgcttggaatgcccttgaaaaagctgcctcacctgttt

SEQ ID NO: 1041271 - DNA, 77 bp, Artificial Sequence
  ENSG00000269427_2 (sequence is synthesized)
tgtgcttggaatgcccttgaaaaagctgcctcacctgtttgtgaagggaaccccaaagagaaagggagaggaagggc

SEQ ID NO: 1041272 - DNA, 120 bp, Artificial Sequence
  ENSG00000269427_3 (sequence is synthesized)
gaaccccaaagagaaagggagaggaagggctgggtgcagaagggccaagacacagaacccaggtctgagctacacctccaacttgctttctgctgcaaccaccttttccaccttctttct

SEQ ID NO: 1041273 - DNA, 120 bp, Artificial Sequence
  ENSG00000269425_0 (sequence is synthesized)
agcggtcctcctgcctcagccacccgaagagctgggactatagcaggctgagccactcgcgcacccgccccaggcttccaccttgcaacctctatccctggacagcgaggcctcagtttc

SEQ ID NO: 1041274 - DNA, 120 bp, Artificial Sequence
  ENSG00000269425_1 (sequence is synthesized)
cgcctcagtttcccgaatgttcccagagggctgagttcccgatctctctcccgcgtgggcatccccgaggcctcagtttctccgcccaccccagcgcgccgagcccttcccccgaccccg

SEQ ID NO: 1041275 - DNA, 120 bp, Artificial Sequence
  ENSG00000265739_0 (sequence is synthesized)
atcataaataatttgagaagacagataataaggaaactagttatgaaacaattaaaataatccaacagaaaagaatgaacatggtgacagtgagaccggaaaattatgacagcaaaacca

SEQ ID NO: 1041276 - DNA, 120 bp, Artificial Sequence
  ENSG00000265739_1 (sequence is synthesized)
ctcacttatgaattgatagcagcatcagaatatgctttcttactcatatggtgtaaaaactttcaccacccccccaaccatctctcccaccttgaacaaaatgataattatttctaactt

SEQ ID NO: 1041277 - DNA, 120 bp, Artificial Sequence
  ENSG00000272824_0 (sequence is synthesized)
ctgtattagtgttatggtttatgctaagcatgtataatttaaaaaaaatgagagtaactttaaaatgatttggaagaaaaatatgtacatatgtgaacagtacttaattccaggtggtgg

SEQ ID NO: 1041278 - DNA, 120 bp, Artificial Sequence
  ENSG00000272824_1 (sequence is synthesized)
aacagatttggaaggggtgtggggcaagtgagaggaaaatgcaagagaaggacaaacctagttctggcaggattgtgtttaagttggaggtttctagggagcagttgttgggataagaag

SEQ ID NO: 1041279 - DNA, 120 bp, Artificial Sequence
  ENSG00000272824_2 (sequence is synthesized)
gatatggggaggcaggagaatcatgaaaatatttaggacagtgtgttgcctgtcatattattcctcctcctttcctgtttcttcaaaagaaatatacagacttacacttcttttcaagca

SEQ ID NO: 1041280 - DNA, 120 bp, Artificial Sequence
  ENSG00000272823_0 (sequence is synthesized)
agggctttatgaggtcatccctggctccagcacctcacaatctttatggtgactgttcagagggcagctaagcagaaaagaagttttcaacaaggctgtttctggcctgttttccctctc

SEQ ID NO: 1041281 - DNA, 120 bp, Artificial Sequence
  ENSG00000272823_1 (sequence is synthesized)
agtactacatggcaagtcacgtctccaaactgaggagtgtgcctgaagagtcaggtctggcagagaaaggatttcttgccctaggtttaaacaagcaatgtcaacataacttccaaaggc

SEQ ID NO: 1041282 - DNA, 120 bp, Artificial Sequence
  ENSG00000272823_2 (sequence is synthesized)
cgtggctgagcaggacagaaatgtcacacaggtggactgagaacaaaatgatttcagatatgggagccccaaagtggcatcccaaggacaagtgctcagaattgcatgacttggttttct

SEQ ID NO: 1041283 - DNA, 120 bp, Artificial Sequence
  ENSG00000272823_3 (sequence is synthesized)
gttgagctattctgtcttggataattacagcatgagctcttggccagtggtgggaattaattggttttaattctcccgcaaagattctcttaagtaaaagtaaaacatttgcaaactgga

SEQ ID NO: 1041284 - DNA, 120 bp, Artificial Sequence
  ENSG00000272821_0 (sequence is synthesized)
aggctgcactggaggcaaaccaggctctgcttccagctgccgcaccacctgcaccagcttctccagctcgtctgggcagatgtcagggcagtgagtgaagccaaagtacatcagcaccca

SEQ ID NO: 1041285 - DNA, 120 bp, Artificial Sequence
  ENSG00000272821_1 (sequence is synthesized)
ctggccccggaagtcagccttgcagcgagcccggcctctgtgatccagcaggtggaagtcgccctggcccacagctgcctggcgcagggcttctgttcgcttttgctgctgcagcctctc

SEQ ID NO: 1041286 - DNA, 120 bp, Artificial Sequence
  ENSG00000272821_2 (sequence is synthesized)
cttctcagccctcagggccagccaggccccaccgagtccagccccgaacaggcctgtgatcagcagccgggttcgaagcccagggccctggggctggccctgcccacctgtctctgcagg

SEQ ID NO: 1041287 - DNA, 120 bp, Artificial Sequence; identical to SEQ ID NO: 21464
  ENSG00000272821_3 (sequence is synthesized)

SEQ ID NO: 1041288 - DNA, 120 bp, Artificial Sequence; identical to SEQ ID NO: 21465
  ENSG00000272821_4 (sequence is synthesized)

SEQ ID NO: 1041289 - DNA, 120 bp, Artificial Sequence; identical to SEQ ID NO: 21466
  ENSG00000272821_5 (sequence is synthesized)

SEQ ID NO: 1041290 - DNA, 120 bp, Artificial Sequence; identical to SEQ ID NO: 21467
  ENSG00000272821_6 (sequence is synthesized)

SEQ ID NO: 1041291 - DNA, 120 bp, Artificial Sequence
  ENSG00000277851_0 (sequence is synthesized)
gtctgctgtgggcccagcagctgcacagacccctcttgttgggagacaagacagggctctttctctcccgtgacctcagcctcatctccaatcgtggggaagagagaaactgaaattctt

SEQ ID NO: 1041292 - DNA, 120 bp, Artificial Sequence
  ENSG00000277851_1 (sequence is synthesized)
cctgtgactgaacacatgagaatgcaacagttacttggggtaacaggtttcctgtgggtcctgtgtgaagagtatgcattcattccagtgtcggggaggggagaagaatgaggaggaggc

SEQ ID NO: 1041293 - DNA, 120 bp, Artificial Sequence
  ENSG00000277851_2 (sequence is synthesized)
agtcccatgtggatgtcagtgtgatgattaggatgcctgatgcttccgaaacaagaatacactttacgaaaatgcccattgaaaatactttttcctttctactcttgtgctaagagtgcc

SEQ ID NO: 1041294 - DNA, 120 bp, Artificial Sequence
  ENSG00000277851_3 (sequence is synthesized)
cgtaatgcaatggcttttacccttgtcccacggcccccctgcccaactcaagaaggtgatgaaataggctgcagaagttcccagccagggtattgtgaagatgaaagcaaagatatggca

SEQ ID NO: 1041295 - DNA, 120 bp, Artificial Sequence
  ENSG00000277851_4 (sequence is synthesized)
agagctcagaagagtacctggcccatattaagtgaccatgctcaagagcttcagaatctttacaacgtgaaagaagatggagtattgccattaccatgtataagaacagacgctccactc

SEQ ID NO: 1041296 - DNA, 120 bp, Artificial Sequence
  ENSG00000277851_5 (sequence is synthesized)
tggttggggatctctctgctctaagatgcaggggttgaaatggactccctggctatggatgagtgagtgtgcatttaattgacatgggagagtttggttattatttaaagcagctgatcc

SEQ ID NO: 1041297 - DNA, 120 bp, Artificial Sequence
  ENSG00000277851_6 (sequence is synthesized)
caaatactggcccccacactagtttggctctgtgatcagattctcacccatctaccgtgaaagaggagagataagattaaaacagtgaagttttaataaatctgaattgttttattctaa

SEQ ID NO: 1041298 - DNA, 120 bp, Artificial Sequence
  ENSG00000277855_0 (sequence is synthesized)
cgaccctcagcaagtcttccccgtgcaggctggggggaactgaaggggacgggacggagacggggtttctccatgttggccagaatggtcttgaactccagacctccagtgatttgcctg

SEQ ID NO: 1041299 - DNA, 120 bp, Artificial Sequence
  ENSG00000277855_1 (sequence is synthesized)
tgctgggattacatgcgtgagccaccacgcccgcctcctgtccacaatctaactgtcaaacaaagatgggctaattaaacggatgccaactaatcggaaaacttctggaattgccgtccc

SEQ ID NO: 1041300 - DNA, 120 bp, Artificial Sequence
  ENSG00000277855_2 (sequence is synthesized)
ctggaattgccgtccctggaaatcctagcaagacacaggacccagaatcctccccattaatattgacgctgtagtgaccaatcaccattaagaggtgccagaaaggaactggaactggca

SEQ ID NO: 1041301 - DNA, 120 bp, Artificial Sequence
  ENSG00000277855_3 (sequence is synthesized)
cgcgggggtaaaaagagtacttgatagggttaacacatataatgcatttagaagagcaattcgcaggtggttaacatctgtaacatttgctattattattattggtagtaaaaattatct

SEQ ID NO: 1041302 - DNA, 120 bp, Artificial Sequence
  ENSG00000277855_4 (sequence is synthesized)
agcatctgtaaacacttgctattattattgatactaaaagttatccatgagctttttttcttcttcttcttactatgcaaagttgggattctgaagtgaacagctgcacggtgttatcat

SEQ ID NO: 1041303 - DNA, 120 bp, Artificial Sequence
  ENSG00000277855_5 (sequence is synthesized)
ctttctacacattcacacataacaatcttaatgatatatcacaatgaataatttgacgttatttagctctccttactctgagctgtggactgcatcaaacccaactcgaatagcgttcct

SEQ ID NO: 1041304 - DNA, 120 bp, Artificial Sequence
  ENSG00000272829_0 (sequence is synthesized)
cctccgacatggggattgagaatgctccggctatgaaaagcatggggtctgtctcaggacacagctcccacagccctaagtgggcaaatgccccaaagtgtcaagcatgagccacctctg

SEQ ID NO: 1041305 - DNA, 120 bp, Artificial Sequence
  ENSG00000272829_1 (sequence is synthesized)
ttgtcccttctacctggaatacccttccttcaaaactcagagccaaaagcaaaaagcgttcgctgatcgcagagggggagagggatgtgggagggcttggggcgcagaattagttgctac

SEQ ID NO: 1041306 - DNA, 120 bp, Artificial Sequence
  ENSG00000272829_2 (sequence is synthesized)
ctcctctgggcgttcacaggccaaatttccttggtgtggcacctggcattctgtgattgtgcctgtttccctgtggtctggtcctgtgcctattggcccaattacactgggagtcataca

SEQ ID NO: 1041307 - DNA, 73 bp, Artificial Sequence
  ENSG00000277856_0 (sequence is synthesized)
gatgattatgccatgcactgggtccgtcaagctccggggaagggtctggagtgggtctctcttattagttggg

SEQ ID NO: 1041308 - DNA, 120 bp, Artificial Sequence
  ENSG00000277856_1 (sequence is synthesized)
tactatgcagactctgtgaagggtcgattcaccatctccagagacaacagcaaaaactccctgtatctgcaaatgaacagtctgagagctgaggacaccgccttgtattactgtgcaaaa

SEQ ID NO: 1041309 - DNA, 120 bp, Artificial Sequence
  ENSG00000234230_0 (sequence is synthesized)
cagctccccggcacgggcccgccgtcagcacgtcacgtcaccgcccgggagagagacccaggaaaatgcggaagggtagacaggccccctcctccgcccgagcttgggagcctgtgaaat

SEQ ID NO: 1041310 - DNA, 120 bp, Artificial Sequence
  ENSG00000234230_1 (sequence is synthesized)
ggagcccaattgggtccttgagccagaaacgatagaaggcctttcaatcatttttccagagaaagattagtcagaaaagaagctgttgattttcactccacatcggagactgatgggaat

SEQ ID NO: 1041311 - DNA, 120 bp, Artificial Sequence
  ENSG00000234230_2 (sequence is synthesized)
tcaaataagaagcaataaattattggcttatgagaaaatgtagaccttcttgaataaagttgtggtaattctttttttttttttgtatcccaaacattaaaaaatatttatcttccccta

SEQ ID NO: 1041312 - DNA, 120 bp, Artificial Sequence
  ENSG00000270087_0 (sequence is synthesized)
cgccgtgcccccctctgaccccctgcgccaggccaaccgcctgccaatcaaggtgctgaagatgctgacggcacgaactggccacattttgcaccccgagtacctgcagcccctgccttc

SEQ ID NO: 1041313 - DNA, 120 bp, Artificial Sequence
  ENSG00000270087_1 (sequence is synthesized)
cacgccggtcagccccatcgaggaggaggattgacaccagccacacgtatgtctgctgctgacaaatgtgcgcacgccttggagggcggggccaggcaggacagagccgcccatgacagg

SEQ ID NO: 1041314 - DNA, 120 bp, Artificial Sequence
  ENSG00000270087_2 (sequence is synthesized)
tcttggactgattatccatcttgacaaaggaggccttgaatcaaatttaatctggtttagtgcacttatcaaagagacatcggagagatcccttgtgccttctgccatgtgagttatagt

SEQ ID NO: 1041315 - DNA, 120 bp, Artificial Sequence
  ENSG00000270087_3 (sequence is synthesized)
gagaagacagccatctactaggaatcagaccgtcatcagacaccaaatctgccagcaccttgatcttagatttcccagactccagaactgttagaaataaatttctgttgtttataagcc

SEQ ID NO: 1041316 - DNA, 120 bp, Artificial Sequence
  ENSG00000270087_4 (sequence is synthesized)
tgacaaatgtgcgcacgccttggagggcggggccaggcaggacagagccgcccatgacagggggacacctcctggacagcagccagattacctccaactccagaccaccacattcaacac

SEQ ID NO: 1041317 - DNA, 120 bp, Artificial Sequence
  ENSG00000253822_0 (sequence is synthesized)
agatgactaggatcacctgtagggaaaacagtattggaagtaaaagtgcttaatggtaccagcagaagccaggacaggcccctgtgtgggtcatctatggggatagcaggcggccttcag

SEQ ID NO: 1041318 - DNA, 87 bp, Artificial Sequence
  ENSG00000270084_0 (sequence is synthesized)
agtggttcttttttcctttgagaaagtctcaccctggcacccagtctcaaaaaaaggaaaattcagagagtaactgaagttttatca

SEQ ID NO: 1041319 - DNA, 120 bp, Artificial Sequence
  ENSG00000270084_1 (sequence is synthesized)
caaaaaaaggaaaattcagagagtaactgaagttttatcattaatgggactaaagtgctttagcccagaaacagatttgtaaaaccattactgctaacaaagacatcattataagcacag

SEQ ID NO: 1041320 - DNA, 120 bp, Artificial Sequence
  ENSG00000270084_2 (sequence is synthesized)
ctgtactgacactgaaattaaaatttgacccatcttggaattttggccccttggtcctgtttccctgggacagattgccttaaaccagttgtgccctttatacccacttttggcatccct

SEQ ID NO: 1041321 - DNA, 120 bp, Artificial Sequence
  ENSG00000270084_3 (sequence is synthesized)
tagtattttctataacttattttcccagcctcagactcaacatgactttctccaagtagctccatcaatactttaagctcaaaaccaattagcacaggggcctatgaaacctgacaattt

SEQ ID NO: 1041322 - DNA, 120 bp, Artificial Sequence
  ENSG00000270084_4 (sequence is synthesized)
gctcatatggagaattaggaaatattgcactttaatgcataagacaccttgtaaaatacccataaaattttaactggctgcagtgttaatgaagcaaataccatggagttataatagctt

SEQ ID NO: 1041323 - DNA, 120 bp, Artificial Sequence
  ENSG00000270084_5 (sequence is synthesized)
ttgaatgtgatttatgcttacagctaatgaacagatgaaaagcactgtccttttttaagtaaacactacacactccagatggattgcaaaaatttattaaaattggagacactgttttaa

SEQ ID NO: 1041324 - DNA, 63 bp, Artificial Sequence
  ENSG00000270083_0 (sequence is synthesized)
gagaaagaggtgtttttgagtgagctggagcacggtgccactcctcagggctgtcgagtccct

SEQ ID NO: 1041325 - DNA, 120 bp, Artificial Sequence
  ENSG00000270083_1 (sequence is synthesized)
tgcttgtgtgtgtgaaaaggcggtagaatgtggtggttaggagcacggacttttcttcaggcgctgccctcaactagctgtgtgaccttgggccagttatttcatctattcctcagtttc

SEQ ID NO: 1041326 - DNA, 120 bp, Artificial Sequence
  ENSG00000270083_2 (sequence is synthesized)
ttcatctttaaaatgggaataataattccttcttcagaaggttactgtattaagttaaaatatctagagtgcttagaacaggacttgatgcatatttaactcattaaatattagctgctg

SEQ ID NO: 1041327 - DNA, 120 bp, Artificial Sequence
  ENSG00000270082_0 (sequence is synthesized)
agccttcaaaaacggatttacttgaaactgtgaggagaaacaagtgcacgggtgcaggtggcggctgccaggattgctccggtcctacctagtgggtgcctacccaggcagggcacagct

SEQ ID NO: 1041328 - DNA, 120 bp, Artificial Sequence
  ENSG00000270082_1 (sequence is synthesized)
tgcagaatcaggccaaaacccacacagccctgaccccctcgtgctctggctggtctcccggtcagcagcccctgagggccggcaggcaggccactgagctgtgggtgacacagggtagtc

SEQ ID NO: 1041329 - DNA, 87 bp, Artificial Sequence
  ENSG00000270082_2 (sequence is synthesized)
ggcaggcaggccactgagctgtgggtgacacagggtagtccacggtttgcacagtctcattcccattcaaagacaggccccaaggct

SEQ ID NO: 1041330 - DNA, 120 bp, Artificial Sequence
  ENSG00000274508_0 (sequence is synthesized)
tctccctaacagcttaggctgtcacagccttccagaggcctcacccatcttagtagggtctattgctcctgttccttaagccctagcagtccctccacccagtaggccctgaaactgtaa

SEQ ID NO: 1041331 - DNA, 120 bp, Artificial Sequence
  ENSG00000274508_1 (sequence is synthesized)
tgcagtcctctcaggctgaggacctgctctgtgcaaaggcctgagagggaggtggagagaagccaggcagaggccagatatattagcagttttcctagaacagttgctaaaatagagcag

SEQ ID NO: 1041332 - DNA, 120 bp, Artificial Sequence
  ENSG00000274508_2 (sequence is synthesized)
acatagcagaccataaaacagaacaggggaagccttctttagaagtggtcctggtatatttctgtcaattgacatatattcacaaattcacgcatccacttaatacgtatttattgagct

SEQ ID NO: 1041333 - DNA, 120 bp, Artificial Sequence
  ENSG00000274508_3 (sequence is synthesized)
ccttctgtatacgaggcactgttcttgttgctgaaaatacaaaactgaacaaaacagaaaagctcctgcccttgggagcttatgttctagtaaggaaatgaaataaacaacaaacagcga

SEQ ID NO: 1041334 - DNA, 120 bp, Artificial Sequence
  ENSG00000274507_0 (sequence is synthesized)
atgaaaaggagcgtggaatcacgcacaccctttcttctccatgcagcgcaatcccaggctctgcagcttcaggttggactctccttgccaccttgccaccacttcagagaatccattaaa

SEQ ID NO: 1041335 - DNA, 120 bp, Artificial Sequence
  ENSG00000274507_1 (sequence is synthesized)
atgttttgacgtgctgatttgccaagcatggcaaagcttgacaaatcttcctctgaacaccccaacttctactctttcgctatgtaccacaaataaagtgctaagagttatgaaacaata

SEQ ID NO: 1041336 - DNA, 120 bp, Artificial Sequence
  ENSG00000234129_0 (sequence is synthesized)
agcctttttcaaaatgtggcggtggcagggaaggttgtctgctccagaggcttccctagagtgaagagctctactatgtatgctttatgcggcagaaggagtgctttggaggagttttta

SEQ ID NO: 1041337 - DNA, 120 bp, Artificial Sequence
  ENSG00000234129_1 (sequence is synthesized)
aatttgttttttttttaaatcttatcggttttaattgtagcaatgattcaagaaacgttagtaggtgcccataacttcggtggtggagatccaaaagtgaacaagacagtgttctggctg

SEQ ID NO: 1041338 - DNA, 120 bp, Artificial Sequence
  ENSG00000234129_2 (sequence is synthesized)
gctaaggcctaaatgaatgaaggtgcaggaccggaagcagaagacagaaagtggagaccagatgtttgaagctgggtaaaggcagggatggagcaggaaccgaggaacaaaccttggaac

SEQ ID NO: 1041339 - DNA, 89 bp, Artificial Sequence
  ENSG00000234129_3 (sequence is synthesized)
ggcagggatggagcaggaaccgaggaacaaaccttggaactaggtaagtttcctgaggccttcccagaagtagaagcctgcacagtcca

SEQ ID NO: 1041340 - DNA, 120 bp, Artificial Sequence
  ENSG00000234129_4 (sequence is synthesized)
ccttcacttggttctgtgccagcactgcccatgaacttcatagactgtgatctttgctaaggcctaaatgaatgaagagtctgatgcttggctgtctgaaacctattcctgaaatgaaaa

SEQ ID NO: 1041341 - DNA, 120 bp, Artificial Sequence
  ENSG00000234129_5 (sequence is synthesized)
ctgtgagatcacatatccagcattgtttctcaaatagaactagaaataatagcctaagaaatgtaccatcagctggaactggaaagaattgtgatacttgaagagacttagcacttggtg

SEQ ID NO: 1041342 - DNA, 120 bp, Artificial Sequence
  ENSG00000234129_6 (sequence is synthesized)
gactatgattttctatcaatcaagtcaagcactgctacccagtcttcactacagagtgcaccggaaagaatgatccagcagtaaaatgctttatgaactatccatatggaaaccattggc

SEQ ID NO: 1041343 - DNA, 120 bp, Artificial Sequence
  ENSG00000234129_7 (sequence is synthesized)
aataacacatcctggcatatggctctgagatgtataaaggcacagtgaattcctgaatcatcctttgatcttccacaagactcagtatcactgattaactacaatttgaatatagttcat

SEQ ID NO: 1041344 - DNA, 120 bp, Artificial Sequence
  ENSG00000234129_8 (sequence is synthesized)
aagtaaaccaagtttacggagttagacaaaactccataaggcaaggtcaacaaaggcagctctgacggactgttcaatcctgactttaggctgatgctggtctctactctgtcttcctcc

SEQ ID NO: 1041345 - DNA, 120 bp, Artificial Sequence
  ENSG00000234129_9 (sequence is synthesized)
tgagagtagggggcctgggggcccttaaataattgctggtgttaaaagggagttcaatattttcaagcatacctagcttctgtttgaagagagacagggtagaagaattacctggaaggg

SEQ ID NO: 1041346 - DNA, 120 bp, Artificial Sequence
  ENSG00000234129_10 (sequence is synthesized)
atagggtacacactgccacctccattgctataacgttttactcttgtcaacagactttcacatatatgctcttgagtcaagcacaggaagaaataaattttgctgctgaatttgaagcaa

SEQ ID NO: 1041347 - DNA, 120 bp, Artificial Sequence
  ENSG00000234129_11 (sequence is synthesized)
ttggccatggaagccagtcttcaggggcattaaaacaaatgcctaacaaaagtttattataaggcacttgctccacctgaactcatttcatcgttagaaaaaaatctaagaagtaaaaat

SEQ ID NO: 1041348 - DNA, 120 bp, Artificial Sequence
  ENSG00000234129_12 (sequence is synthesized)
taatatccttcccttttcacaagatgatggaatcaagagccttaacaagttttaatggcctgccaagggtcatttgtcaacttctgagtctaatgtctatgttctactcatgacatggca

SEQ ID NO: 1041349 - DNA, 120 bp, Artificial Sequence
  ENSG00000234129_13 (sequence is synthesized)
gttgtggtatagagggatctgatacatcatgaaaatataaacccacagattttgattctaagaaagtgacccaagttgtgctcattatggttttgcttaaaattaaagtttagattgaaa

SEQ ID NO: 1041350 - DNA, 120 bp, Artificial Sequence
  ENSG00000234129_14 (sequence is synthesized)
ttcttaggttaagggaaatgattaacttgatttatctatgaaggttttttctcagtgtggaggaaaatagataatgtgcattgccaagtgatttgcaagacattgattgacttagtaaac

SEQ ID NO: 1041351 - DNA, 120 bp, Artificial Sequence
  ENSG00000234129_15 (sequence is synthesized)
atttattgaatatctactttatttaaagcattgtgttgggcacgcttgggggtaaaattagatacagttcttaaacagaaggaagaaaagaaatccatgtttttggaaaggctgtgactc

SEQ ID NO: 1041352 - DNA, 120 bp, Artificial Sequence
  ENSG00000234129_16 (sequence is synthesized)
atttaagctccataacatcgaggaagatgagaattacaatattattatatgtcatttttggtattaatgggattgaacttattaaataatacatagtgagtgataacggttcaaatccag

SEQ ID NO: 1041353 - DNA, 120 bp, Artificial Sequence
  ENSG00000234129_17 (sequence is synthesized)
gttggattagctcaaacatgtactttcttctcagtactccatattgcttttcttatttaaatgtcttcataatttctttaagatattttcataaattgggatttaaaatgtattctggta

SEQ ID NO: 1041354 - DNA, 120 bp, Artificial Sequence
  ENSG00000234129_18 (sequence is synthesized)
acctactgtgtgcaagccactgggatgaacatcttatatatagttttttatttcatccccatagttatcctagagacaggcatgattcccttcttcttacaagtgaagaaactaaggctc

SEQ ID NO: 1041355 - DNA, 120 bp, Artificial Sequence
  ENSG00000234129_19 (sequence is synthesized)
agaagcattgagtgacttgctccaaatcataaaattagtggtggagagaaaatttaaagacaggttatctggttctggaatctacacttttactaactgctctcaatggcctctccttag

SEQ ID NO: 1041356 - DNA, 120 bp, Artificial Sequence
  ENSG00000234129_20 (sequence is synthesized)
ctggcatgacagttcgcagtccagcatggcaaccagcagcccagcatgaaggaggcagacagttgaacagattatttttatggcttacttaaagaaatagttttgatgtcaaatccattt

SEQ ID NO: 1041357 - DNA, 120 bp, Artificial Sequence
  ENSG00000234129_21 (sequence is synthesized)
tggtttcaaatgggaaaatcagagttaacctctctatactattcagaaaaaatcagctgaaaagtgcagaaaccaaattggtttaccaactggtggtcatcatgccgagagcattataac

SEQ ID NO: 1041358 - DNA, 120 bp, Artificial Sequence
  ENSG00000234129_22 (sequence is synthesized)
caatgctctcctctttgcagtcccttcaccccagttgactaattgtttagatccaattaactttcatttgttgtatgttgcataaactggactttacaactaggtataagaagaacaagg

SEQ ID NO: 1041359 - DNA, 120 bp, Artificial Sequence
  ENSG00000234129_23 (sequence is synthesized)
agggaagaagagtatcttctttgtattaaattatgtctcgtttttcacaagatagttcatatctccctttaaatgtcatatatgatatatgcctctttaaatgttgtgattgcttgaaat

SEQ ID NO: 1041360 - DNA, 120 bp, Artificial Sequence
  ENSG00000274501_0 (sequence is synthesized)
gacaaaggtggcctcgtacacctccccaggccaggattttgggcggttccttctagtgcctactgttcttaggcacacagggccctgccaatgaccgggggcgccaggggctacaggact

SEQ ID NO: 1041361 - DNA, 120 bp, Artificial Sequence
  ENSG00000274501_1 (sequence is synthesized)
gttaaacccagagtgaattcgattaaatacgccccttcagcacacccacaccatcattagtaaaacctcttctagaatatttgacaatattaaaagccttgaaatttgtaaactctttaa

SEQ ID NO: 1041362 - DNA, 120 bp, Artificial Sequence
  ENSG00000284646_0 (sequence is synthesized)
agtagaacgtaagttgcaggagggcagggagttttgccagcagtactcagtaggtaggggctccataaatacgtgctgattgagcagagctgccgtgggtctttgaagcagacagtgagc

SEQ ID NO: 1041363 - DNA, 120 bp, Artificial Sequence
  ENSG00000284646_1 (sequence is synthesized)
ctcaaaagtggatcgttttaatacctcccttctgaagaggaaagtctgtgctgcgccttcttcctccctctgtgtgctcgtcctgcccctgccagcagccccatccacgttcagggaggc

SEQ ID NO: 1041364 - DNA, 120 bp, Artificial Sequence
  ENSG00000284646_2 (sequence is synthesized)
agggaggaagggagtccaggctggccaaaggccttggggccagcagacacttccagaaaagaccatatggaagagttgtgaagatggacagtggtgacagctacacaacaatgtgaaggt

SEQ ID NO: 1041365 - DNA, 120 bp, Artificial Sequence
  ENSG00000284646_3 (sequence is synthesized)
ccagagataaagccccacaaccagagatggcaaagcacctcctttctctgcctccagagaggagaattcagccgagcaggaaactacggagtctctgattggcttctgagagctggagca

SEQ ID NO: 1041366 - DNA, 120 bp, Artificial Sequence
  ENSG00000284646_4 (sequence is synthesized)
gtttctctcaataaacaggagcagccagcagcaggactggagtccacaggtgatctgtctctgacctcaggtgtccacaaccatcctctcagaagacaggcaagcaaggcagctctcctg

SEQ ID NO: 1041367 - DNA, 120 bp, Artificial Sequence
  ENSG00000284646_5 (sequence is synthesized)
cccctcagcactggccacgctgggacacagtgggacaccaggactttaagccatcctttaggccaaagaatccccacataacaaattcattgtgtgcaataaagaacttggctgcacccc

SEQ ID NO: 1041368 - DNA, 120 bp, Artificial Sequence
  ENSG00000284645_0 (sequence is synthesized)
gagaagatgagagaaaagaaggaagggaggatactgccttgcactcctagtattggaggcctctgagcctcctgttgggaagaacagaggaaattagaagctggtagttctggtctcccc

SEQ ID NO: 1041369 - DNA, 120 bp, Artificial Sequence
  ENSG00000284645_1 (sequence is synthesized)
ttctgcacaacccgccatggcccccactcccagatccagtagctcacagaggagcagcatggtagagaaaatcagatgatgacatcaagaaaccagggatgttttggaggcccactgaga

SEQ ID NO: 1041370 - DNA, 120 bp, Artificial Sequence
  ENSG00000284645_2 (sequence is synthesized)
gaactgatgtaaaatgctctaaagatgaagagaattacaacaaatcactcatggatggaggcagaacaagttcagctcagcttcatgggactggccagttcttactgtggtcctaggagg

SEQ ID NO: 1041371 - DNA, 120 bp, Artificial Sequence
  ENSG00000284645_3 (sequence is synthesized)
taggattcatggtcttctgtgtctgttcacagcccaagaacaggaagaagggacagaacatgtttctgagctcctgcactggggcatgaacacagtttgcattcccgcttatatgtcaat

SEQ ID NO: 1041372 - DNA, 120 bp, Artificial Sequence
  ENSG00000284645_4 (sequence is synthesized)
gtctgtacccacatatacagtttgtattcacatttatatgtcaatgtctatacccacatatgggtcataggttggcttcttcagagcagaccttgacatggagatacatatgcaagtgat

SEQ ID NO: 1041373 - DNA, 120 bp, Artificial Sequence
  ENSG00000284645_5 (sequence is synthesized)
ttatttaaggaaatgtttctaggagaaaccagtgagggagtaaagaaagcaggacaggaaggagaaggagccaaataaggctgtgttctcaggcaaaagtcctgcagagggtagatttga

SEQ ID NO: 1041374 - DNA, 120 bp, Artificial Sequence
  ENSG00000284645_6 (sequence is synthesized)
gcctgatcctgaaggggaagtctgaaatatacatcatcccaactcaaggcaagggagctgggctttcactctcccccttccaacatccaacaattgttgtaaactcccagacacctctag

SEQ ID NO: 1041375 - DNA, 120 bp, Artificial Sequence
  ENSG00000284645_7 (sequence is synthesized)
ctgtctgtactaatgggctaatgctaattcccagtagcctaagagccattcaccaaagaagagccaggagtgcttttgaaagcatattaagtgaggtgtggggacttctgtggagcacca

SEQ ID NO: 1041376 - DNA, 120 bp, Artificial Sequence
  ENSG00000284645_8 (sequence is synthesized)
acattttctgctagaatgttcctaggtgtgctggtctccccagcctcactggctatctcttctcagttttgtttaagagttccacttcctctataccttaaatgatggcatttcacctgc

SEQ ID NO: 1041377 - DNA, 120 bp, Artificial Sequence
  ENSG00000284645_9 (sequence is synthesized)
ttaaaactcttccctggttcctgactgccttgaggataaagtacaagtcccttcacatgattaagaagtcccttcatcctctgccctctgctgactacccccaagcctcatctttcacat

SEQ ID NO: 1041378 - DNA, 120 bp, Artificial Sequence
  ENSG00000284645_10 (sequence is synthesized)
ggcccctcactctactgcaaccagacaagaccttgctgttgtataggaattgtagaggggtcccacaaagccttaaaactgctcatagaccactggagaagacagaaatgtgacaggcaa

SEQ ID NO: 1041379 - DNA, 120 bp, Artificial Sequence
  ENSG00000284645_11 (sequence is synthesized)
atctagaagtttacgggaatagagataaggtacctaacttagcctgggttcaatgaagacttcccatggggaacaaatgtgaaggcaaagcaggaagataagtgtagaaagagtgatcct

SEQ ID NO: 1041380 - DNA, 120 bp, Artificial Sequence
  ENSG00000284645_12 (sequence is synthesized)
ggcaggatttgcagcactggggagaggtggggaattgtgagcaggcatggaacagagtggtcacaaaataaatatttgtgcaatgaatacatgagtgaatagccacacaagttttacaca

SEQ ID NO: 1041381 - DNA, 120 bp, Artificial Sequence
  ENSG00000284645_13 (sequence is synthesized)
cagacaacttatttaaccactctgaacctcagttttctcatttggaaaatggggctaatgaaaatatctgatatgaaacaatggatgcaaaaatattctgtaagctgcaaaaccctgttc

SEQ ID NO: 1041382 - DNA, 120 bp, Artificial Sequence
  ENSG00000284645_14 (sequence is synthesized)
aaatattggctttcattcatttatttattcaaagaatagttttgagttcctactgtattacaggtcatgcgctgggaatttgtcccggaaataggaactagatggggactctgtttccaa

SEQ ID NO: 1041383 - DNA, 120 bp, Artificial Sequence
  ENSG00000284645_15 (sequence is synthesized)
gtagagaggagaaaagtttaggagaggaggcaaggagacaaggagaggagagaagtttagctcataatgagacatgttgccatagttacaatctgggagctgagagagctcagtgaaggt

SEQ ID NO: 1041384 - DNA, 120 bp, Artificial Sequence
  ENSG00000284645_16 (sequence is synthesized)
ttcacaaagaaggtaaaatttgtataagtgtgccctgatggctaagggtgggtgtgtcaagtgaaggaggggtccaagtagagagaaaatatatgaagacacagggggtaaaaaaacagt

SEQ ID NO: 1041385 - DNA, 120 bp, Artificial Sequence
  ENSG00000284645_17 (sequence is synthesized)
gtgtttagaccagggggattggtctggatggcatagtgtatgtgggatggtggtaggatgtgaaaaggaatgagaaagtcttttgaggtcaaatcatagagaggaaatttgaatattttt

SEQ ID NO: 1041386 - DNA, 120 bp, Artificial Sequence
  ENSG00000284645_18 (sequence is synthesized)
ctataggtattggggaccctttttggcatgagagttgcagtggcactgagatgacaggaataagtgagcaaagcctgtttgaggtctaggaagaagaggtgtggtaacggtaccttaaga

SEQ ID NO: 1041387 - DNA, 120 bp, Artificial Sequence
  ENSG00000284645_19 (sequence is synthesized)
actggagaaacttctggaccttcactgccaatgcacaaccatcaccgccaccaagcttcagcaatctctcccttggacagctacctgctgtgaaaatacttgcttaatgtagttcctctt

SEQ ID NO: 1041388 - DNA, 120 bp, Artificial Sequence
  ENSG00000284645_20 (sequence is synthesized)
gaaaatgttgttcctgcattatgactttcattacacatttcccaatgagctttgtttggttattttacttgtgtttctattgacagggcataggatgaaacaccttctaattacctctga

SEQ ID NO: 1041389 - DNA, 120 bp, Artificial Sequence
  ENSG00000284645_21 (sequence is synthesized)
atatctttactggttatctatggctgtgtacaaaccatccaaaactcagtggcttaacacacccatttacagaggtcatgattctgtaggtttgtatttgggctatcttcaggcaggcag

SEQ ID NO: 1041390 - DNA, 120 bp, Artificial Sequence
  ENSG00000284645_22 (sequence is synthesized)
ttccactgctgatcttggctgggctcattcactttgtgtatagttttgagtcagttgggaagctctgctttggagataggctggctatcaactctgtggttatgggtatcaactgagcca

SEQ ID NO: 1041391 - DNA, 120 bp, Artificial Sequence
  ENSG00000284645_23 (sequence is synthesized)
tgtgttttttatcatctaggagggtagtctgggcttgagcacatgatggtagtctcagtattccaagaagagcaagagatgtagctgcaatgcctcttgaactaggcttataactcaccc

SEQ ID NO: 1041392 - DNA, 120 bp, Artificial Sequence
  ENSG00000284645_24 (sequence is synthesized)
agtgtcatttatattattggccaaagcaagtcacaaagccagcctgaaatgcactccacctcatgatgggagaatttgcaaagtgctgtggcaattttcccaatatgcttcaaggtgtat

SEQ ID NO: 1041393 - DNA, 120 bp, Artificial Sequence
  ENSG00000284645_25 (sequence is synthesized)
aaactttcttccattaatcctggcatatgcaaggaggaaagaatggaaaacattccaaagaaagtttttgttattgttgttattttctataaccataacaaatactggaagcatgatgat

SEQ ID NO: 1041394 - DNA, 120 bp, Artificial Sequence
  ENSG00000284645_26 (sequence is synthesized)
tccctattgtttacacattatcattattatttattgagcacctcatatgtgccagagaccagtcaaataacaatgaaaaagatatacacagtacttgttcccatggggcttacagtctga

SEQ ID NO: 1041395 - DNA, 74 bp, Artificial Sequence
  ENSG00000284640_0 (sequence is synthesized)
agagcgctcccgggtaggcatttgccccggttgaacacctcaccagagcagcgcacagcaggcccccgtaagtc

SEQ ID NO: 1041396 - DNA, 120 bp, Artificial Sequence
  ENSG00000284640_1 (sequence is synthesized)
tggacatctgaaacttgctagagccctgtcgagcataactgtgtagaggtgttggactcaagtttactctagcagacctgacctccaggaccagccttgggcatcagtaaactgggagct

SEQ ID NO: 1041397 - DNA, 120 bp, Artificial Sequence
  ENSG00000284640_2 (sequence is synthesized)
atacgtggacgggaacagcttcatcaacccacaaggagagagatgtgcagaatatgcggtggtaaccctggacactgtcgttaagctgagctgattgctttaattcagtccttagaactc

SEQ ID NO: 1041398 - DNA, 120 bp, Artificial Sequence
  ENSG00000284640_3 (sequence is synthesized)
agtgaagttgcaggtgttgtgtcttggatccatcacagtcagctaacactggcagctcaggacaagtggaccagccagcaggatgcagatcacccaacctggctgatcctgagacgagac

SEQ ID NO: 1041399 - DNA, 120 bp, Artificial Sequence
  ENSG00000284640_4 (sequence is synthesized)
caagctgctgctgaggacgacagccctgctctggtcactccggaggctgaccagtctacgcacggccgaagcttgaggactcatcgagcaagtaaatgtagttaaaaatcttaagactaa

SEQ ID NO: 1041400 - DNA, 120 bp, Artificial Sequence
  ENSG00000284640_5 (sequence is synthesized)
tagttttcctgtaatactaactgttttcctattgttcggtcgctgtattcaacctttttcccaggtaaggacctcttttgtccttgctggatacgaatatgctgtacattgttttgttgt

SEQ ID NO: 1041401 - DNA, 120 bp, Artificial Sequence
  ENSG00000284640_6 (sequence is synthesized)
tgttaacccccataaccatgttagaagaaacacctatataaggtgtccccactgtacacatactacttaggaaacccagacctgtccagcccagtaacaattctgagtctttcagtcatt

SEQ ID NO: 1041402 - DNA, 120 bp, Artificial Sequence
  ENSG00000284640_7 (sequence is synthesized)
tgctagctgcctagatgtttcttcatgttatgtttataaaaaggctaacataagagaccaatggccttgagaagcaaaagagttaatgcctcaagataactttaactagctctttcccca

SEQ ID NO: 1041403 - DNA, 120 bp, Artificial Sequence
  ENSG00000284640_8 (sequence is synthesized)
aacagatgccacaagttcaagcatctggctcttaaaacttctattattaaaaaataccatgttactcactaggaaaaagcttttaagacacagtaaaaagaactaacctgcttaaggcat

SEQ ID NO: 1041404 - DNA, 120 bp, Artificial Sequence
  ENSG00000284640_9 (sequence is synthesized)
gacaaagttggtacatgtgcatatacaggtttaacacaggtctgatcctaggtgttcatttagaacatagtttccagctgtaagaaaatttaaaaccctcattgtaagtgtattactagt

SEQ ID NO: 1041405 - DNA, 120 bp, Artificial Sequence
  ENSG00000284640_10 (sequence is synthesized)
aataggaacttgcttgctgctcccctgtatattatatttgctccttcaaatgataaaaggttttgtagctaccatggttcagcagaaaacttcaacacaagtatattacataaaatacta

SEQ ID NO: 1041406 - DNA, 120 bp, Artificial Sequence
  ENSG00000284640_11 (sequence is synthesized)
tcactctgtctcacaaaaagactcaaaaagtaaaaataaaagaactcccactgattagtgaaaattctcaaagggggagataaggaaggagaccactactactcctgctgccctcctctc

SEQ ID NO: 1041407 - DNA, 120 bp, Artificial Sequence
  ENSG00000284640_12 (sequence is synthesized)
cccaccttgcctagttcgcaagacaggaggagagaaaaacaaaaagttggaaaaaaaacaaaagtaagataaacagccagacaaccttggcaccaccacccggccttaggagttaaaaaa

SEQ ID NO: 1041408 - DNA, 120 bp, Artificial Sequence
  ENSG00000284640_13 (sequence is synthesized)
agtaataatgataacctcaacccctgacctaaactacttgtgttgtctgtaaatttcagacactgtatgaaaaaaagcattgtaaaactttttgttctgttagctgatgcatatagcccc

SEQ ID NO: 1041409 - DNA, 120 bp, Artificial Sequence
  ENSG00000284640_14 (sequence is synthesized)
atagcccccagtcatgtttcccatgcttgcttgatgtaccacgacccttacacgtggaccccttaaagttgtaaacctttaaaaaggccaagaatttctttttcggggagctcggctctt

SEQ ID NO: 1041410 - DNA, 120 bp, Artificial Sequence
  ENSG00000284641_0 (sequence is synthesized)
aggtacccctgaggtctaactctggaactccttggataatgagaaaaggggggcttcggaacccaggacgtgggttccacatcctgcgggggcagggaggccgcgcgggaggccgccaga

SEQ ID NO: 1041411 - DNA, 120 bp, Artificial Sequence
  ENSG00000284641_1 (sequence is synthesized)
cgcagtaaataattcacacagatgaactggagataagggcggcttcgtggaggatcgagttcaggcagactttataaaccagagcagctgcctgaaggtttccaagaaaaaaattctgca

SEQ ID NO: 1041412 - DNA, 120 bp, Artificial Sequence
  ENSG00000284641_2 (sequence is synthesized)
cagtttctaaccagggtgacagttcccctccacaggaagttacttttattaatttttttatctcttcttttgtaagactatatactggtcatcaggcagcacctgtgggcattttcttat

SEQ ID NO: 1041413 - DNA, 120 bp, Artificial Sequence
  ENSG00000284641_3 (sequence is synthesized)
ttccccccactgctcccatttgcctggaattcattattaaatctaactcatagtggccttgcccaacacaggggcgaagttcaaactactgaaaaatgggtcactcaaatcgcctgtgca

SEQ ID NO: 1041414 - DNA, 120 bp, Artificial Sequence
  ENSG00000284641_4 (sequence is synthesized)
tactcctccctcaaggcggtgaaacataaatccctgtccctgaagtgtgggctgtgcataatgatttccttctatggagtatagtatggaaagcagggggaaagagtaatcttgcaggag

SEQ ID NO: 1041415 - DNA, 120 bp, Artificial Sequence
  ENSG00000284641_5 (sequence is synthesized)
agaaacctgacaagcactagctcagccagatggccaaggtcaacatcagcagcgatcagtcgtgtctatagcatggacacttgatatgatgtgatggaaacagcacatcacccccaaacc

SEQ ID NO: 1041416 - DNA, 120 bp, Artificial Sequence
  ENSG00000284641_6 (sequence is synthesized)
cataaccacagttgaaccatgagaaaaacagcagacagaccccacctgagggacagtctacaaattacctgaccaacagtccatcaaaagcaaggaaagtctgagaaactaccacagcca

SEQ ID NO: 1041417 - DNA, 120 bp, Artificial Sequence
  ENSG00000284641_7 (sequence is synthesized)
agagcagcctagggaaataagatggctgcatacaatgtgagagaccctgtggaacagagaaaggatggtgggtaaaaactaataaaatccaaataaactacagagtttagttaacaataa

SEQ ID NO: 1041418 - DNA, 120 bp, Artificial Sequence
  ENSG00000284641_8 (sequence is synthesized)
agggttcacggacaaccggatcctctgtctcccctcccccacgggaggctgggcgtcttagactcccaactgtgttctctgggagcttccagctgcaggaacctacagaatcatcctgtc

SEQ ID NO: 1041419 - DNA, 120 bp, Artificial Sequence
  ENSG00000284641_9 (sequence is synthesized)
tgaccccctcgttttatgggagtagttgagaccacggactctggggacctgcccgtcctggttgcaagccccgctccaccatttcctgctgcagactttataaaccagagcagctgcctg

SEQ ID NO: 1041420 - DNA, 120 bp, Artificial Sequence
  ENSG00000284641_10 (sequence is synthesized)
ccgcagcaatgtcaggtgttaacaataggagaaactgggttggggtatatggcaattctgtactatctgcaaaacttttctgtaagtctaaaactattctaaaagtttacattttaaaca

SEQ ID NO: 1041421 - DNA, 120 bp, Artificial Sequence
  ENSG00000266717_0 (sequence is synthesized)
tcctcgttagattgtttctgtataaaacaggtttatatatgaatacatacattaaagtaatatatacaagatatattctaaagttgtttaaaaatgattgtctttgggggttagatttag

SEQ ID NO: 1041422 - DNA, 120 bp, Artificial Sequence
  ENSG00000266717_1 (sequence is synthesized)
agatcattttcatttgttggctttgaagggcaactgaccaacttttttatacataaaggatataaactacaactattttcccactctgtgtagaatgtggaacggaaacagtgtgtggca

SEQ ID NO: 1041423 - DNA, 120 bp, Artificial Sequence
  ENSG00000266717_2 (sequence is synthesized)
atactgtgaaatatatatttgatcttcctccctgtttcccagcatacaattcctaaaaccctcagaatctgcaaaataagatttttttttaatgctaatgattgactgatggctggaggc

SEQ ID NO: 1041424 - DNA, 120 bp, Artificial Sequence
  ENSG00000266717_3 (sequence is synthesized)
tcctagagagcctcaggattggggctgattctcagggctttcagtgccacctcccaacctctgagaaaaagagagagagagagaggccaggagttcgagaccagcctgacaaaaaatggt

SEQ ID NO: 1041425 - DNA, 61 bp, Artificial Sequence
  ENSG00000266717_4 (sequence is synthesized)
gaaacaccaactcgggaggctgaggaagaagaatcacttaaacctgggaggcaggttcaat

SEQ ID NO: 1041426 - DNA, 120 bp, Artificial Sequence
  ENSG00000261693_0 (sequence is synthesized)
gtgctcggccgggggctggcaggccccgcggggactccggactcccagtgtcaccaacgaggaaactgagtctcaagacatctgagggacctttgcccgaggtcgcagcccctccctgga

SEQ ID NO: 1041427 - DNA, 120 bp, Artificial Sequence
  ENSG00000261693_1 (sequence is synthesized)
ggagctgaagtgcagagtagggagccccttgcggagaccctcctgggacctccttccgcaggggcctggggcgcctccctttccctgctctgcctgcgggcactgagctcccgaaagact

SEQ ID NO: 1041428 - DNA, 120 bp, Artificial Sequence
  ENSG00000261693_2 (sequence is synthesized)
ccagcccctcgctctcccggtgacctgctggagaagacacctgggaggaacctgcggacaatgggtgtgtgtccttgggccgccagggtcacctttcagcctgtttccccagaggtgaac

SEQ ID NO: 1041429 - DNA, 120 bp, Artificial Sequence
  ENSG00000261693_3 (sequence is synthesized)
caagagtcacacccaaggcaggagagcaagagtgatgagtccgctgcaccttctccggcaagcggaggttctcccgccgccctcactctgtgatgcttgctgtgcttgcgaggcctacgc

SEQ ID NO: 1041430 - DNA, 120 bp, Artificial Sequence
  ENSG00000261693_4 (sequence is synthesized)
caaagccctgcgggcagccctgggctcccgcggacagccttgctgagctcctgggaaggaggcgtgccctccccttcccccaccgccccgctggctggggttctctgcagcccaggactg

SEQ ID NO: 1041431 - DNA, 120 bp, Artificial Sequence
  ENSG00000261693_5 (sequence is synthesized)
tgcatgtgtgcgcacacgggttctgtgaacacgaacacaaaagtgtgctcgtggacactgcgtggtactgtgtgcacacagcgcacgtctgtgagctgagggagtgttcctggacaccag

SEQ ID NO: 1041432 - DNA, 120 bp, Artificial Sequence
  ENSG00000261693_6 (sequence is synthesized)
gtgcaagtgcacaagtgtgtgtatgctggcacaagtgtgtgcccaggcgcaaacatgggaacggtagtatatggcacaaatgtgtgcacacatgggtgggagggaagaggggcacatgcc

SEQ ID NO: 1041433 - DNA, 120 bp, Artificial Sequence
  ENSG00000261693_7 (sequence is synthesized)
caccagcattcctgggctggtgctcaggccggcctgtcctgggcccacccacgctccttgccttggtgtatttcagtctcccctgggctcccaggaggcagtagtgtgtgcctgtcttgc

SEQ ID NO: 1041434 - DNA, 120 bp, Artificial Sequence
  ENSG00000261693_8 (sequence is synthesized)
agcctcgccatgatttggacagggcttcactcttcggctaggacagctagagtgcagggaagccggctcctaaccagggaggatgcccatgactgctgaccccccagcttccacttgaag

SEQ ID NO: 1041435 - DNA, 120 bp, Artificial Sequence
  ENSG00000261693_9 (sequence is synthesized)
gggaaggttcgccaggaccaatgcctgtctgagagctgtcagtctggactgaggatgccgggtgcctggcacggtgcccacctccccttccgtggctggcgctgtctgtctggccgccac

SEQ ID NO: 1041436 - DNA, 120 bp, Artificial Sequence
  ENSG00000261693_10 (sequence is synthesized)
ctcactcagcctcctctgacagctccgtgttcaggtgtgcaaaggaggggaaagtgaagccctttcctcccagggcagaccacctccaggagccgctttcttgaccatacaaggcgtata

SEQ ID NO: 1041437 - DNA, 120 bp, Artificial Sequence
  ENSG00000261693_11 (sequence is synthesized)
tggggctgtttctgtgcctggacactgcagggggaatggtctagcgtgggtaggaaccaccagaggaggggctccgtacctgttggctcctccgaaatctgggatgagcccgcctgagtg

SEQ ID NO: 1041438 - DNA, 120 bp, Artificial Sequence
  ENSG00000261693_12 (sequence is synthesized)
ccccacagcaagtcagggaaggtaaacctctccgtggaagagccaggagcccactccctcaggctgagccgatggggagggggaggaggatgctaaggggtcctcaggaagggatgaggg

SEQ ID NO: 1041439 - DNA, 120 bp, Artificial Sequence
  ENSG00000261693_13 (sequence is synthesized)
aaatagccaatagctgcctgggcctagggccggggctcccctcccttccctcatctctgcccctccctggaagaggtcatcacatgacctcgggcagctctgggctccctccttcctcca

SEQ ID NO: 1041440 - DNA, 120 bp, Artificial Sequence
  ENSG00000261693_14 (sequence is synthesized)
gggaagaactctggtcccaccccttggccaaccagtgagaccaacagggtgaataagtgggattggccccaggacgctgagttctgttacctaagggggtgggggttgcctggtcctcag

SEQ ID NO: 1041441 - DNA, 120 bp, Artificial Sequence
  ENSG00000261693_15 (sequence is synthesized)
ctggcaccccccaaattggatctaccattccaggtcccagagggaatgtgggcaacaaggttagggggtggttccaaggccttcggaaggaacgttgaggcagcacccactaaagccaac

SEQ ID NO: 1041442 - DNA, 120 bp, Artificial Sequence
  ENSG00000261693_16 (sequence is synthesized)
ctcagaaatgctccctctctgaatagtagcatggacttctcagggtttaagctgaatttccaggtcagtgtcaacctatggctttgtcgtgagtttccccaccctcccacccttcctctc

SEQ ID NO: 1041443 - DNA, 120 bp, Artificial Sequence
  ENSG00000261693_17 (sequence is synthesized)
taccctctgctgcctggcttcaatgtcacctgctcaggagaccatcccttgctcccctgcagcccctgcctggacaggagaaggcctgtgcacctcctgctctgctcccagcacagcttc

SEQ ID NO: 1041444 - DNA, 120 bp, Artificial Sequence
  ENSG00000261693_18 (sequence is synthesized)
tgctccagcaaagcccacgggcactcagtccttgattcctgcacccaccaaccccgccgagccgccctcactattacccaggcctcctttgtcccttagcaacagaaccccagttttgtt

SEQ ID NO: 1041445 - DNA, 120 bp, Artificial Sequence
  ENSG00000261693_19 (sequence is synthesized)
caaggcatcaatgtagccagcctcaccagcagctgggccagctgtgacactgtttgcccaggggatgactgcaggaggcacaatcgagcctcctggtcctttggaaggggcagctgtggc

SEQ ID NO: 1041446 - DNA, 120 bp, Artificial Sequence
  ENSG00000261693_20 (sequence is synthesized)
cacccacctcactgacagtcttcctttctcctggctccagcctgaagtgtgggcacggcatcccgaggacagcagccatgtggccagcaaggggcagggtcccaagctgaggatgtgagc

SEQ ID NO: 1041447 - DNA, 120 bp, Artificial Sequence
  ENSG00000261693_21 (sequence is synthesized)
agctgccttggtgccccaatggcaccgtcagactcatcaccatggggagaacaagcccctgctccctttatgggtctgcctcattggatttcgtcaggttttctgtaactgaagccagtg

SEQ ID NO: 1041448 - DNA, 120 bp, Artificial Sequence
  ENSG00000261693_22 (sequence is synthesized)
ccacttccattgtagctgatttgggctcctaagctcacgggagtgggacatcgttctattagctgcgtcctgcccctcaacaacgatggctccttgcgggcaggccccaagggcgcgtca

SEQ ID NO: 1041449 - DNA, 120 bp, Artificial Sequence
  ENSG00000261693_23 (sequence is synthesized)
tggccccacacacctggaacacacagtgccccacacctggaacagcctggaggagcttgtgaggcatgagggcgcgggagccacactctcaggtgcctgttttccacatgtccccatgca

SEQ ID NO: 1041450 - DNA, 120 bp, Artificial Sequence
  ENSG00000261693_24 (sequence is synthesized)
gcccgggcttccaaccacatcttaaaaaataaaaagacgaggaggagaagaaactttggtcctaacaccagactaagccctgtcttgctgtgtgatgctcagcctgaggcacaccttctc

SEQ ID NO: 1041451 - DNA, 120 bp, Artificial Sequence
  ENSG00000261693_25 (sequence is synthesized)
taggcttgttcaccaaagccgcaatgcaggggcagagcggtcatgaggcctgcccaagagtgaggttggtaaagggctgggcagaaccaagggcatggggtgtgtgggagggtggcggtc

SEQ ID NO: 1041452 - DNA, 120 bp, Artificial Sequence
  ENSG00000261693_26 (sequence is synthesized)
cattcccttgtcacccacgcagaggcagtgtcatgaggggacacgtgggagtctctgggaagggcctgacacagccccagcacaggacagtggtctgaccattcaagactcagtctgcgt

SEQ ID NO: 1041453 - DNA, 120 bp, Artificial Sequence
  ENSG00000261693_27 (sequence is synthesized)
catcagagaccaggctcttagaaaccaactccatcctgatgtgcataacagcctcccaaggtgtttaacatggagcaggagtgacaaaaagaaaaatgaagtaaaagaatagaaaatcca

SEQ ID NO: 1041454 - DNA, 120 bp, Artificial Sequence
  ENSG00000214870_0 (sequence is synthesized)
gagtcagacccatttaaggaaatgtggaaggagaaatgctccaggctcctccccgtttcccaaaaagaacaaaatgaatggagacaagccgtgaacttggctttatcactctcttgcatg

SEQ ID NO: 1041455 - DNA, 120 bp, Artificial Sequence
  ENSG00000214870_1 (sequence is synthesized)
gtctggctttaggggaagaaagaagaccagggaggaaatctgcagttaccagagatgtctccaagagcaccagcaaccccagctatctggatctgaagtggatatgctcagagacatcct

SEQ ID NO: 1041456 - DNA, 120 bp, Artificial Sequence
  ENSG00000214870_2 (sequence is synthesized)
ggcccaccccaaagaagatgctgctgcactcagaagacgccagagctagccaccacccacactgcaagtctggaagctctgcaaggacccagcaaggcagcctgctcagcgaaggctttg

SEQ ID NO: 1041457 - DNA, 120 bp, Artificial Sequence
  ENSG00000214870_3 (sequence is synthesized)
tcctgtggcaggaagagcaacattaagaacaagaaccccgggctggactacccctgagatttaatgaccagagctgagacccccaagaccacaatgactatggagggctgtcattaccct

SEQ ID NO: 1041458 - DNA, 120 bp, Artificial Sequence
  ENSG00000214870_4 (sequence is synthesized)
gcctgaccctctaatgcctctcagttcaaggaggccactgagtgaaactgaaggctggttttccttggaagccagcggcccatccacctgctccacttccctgcctcttgcagcctccgc

SEQ ID NO: 1041459 - DNA, 120 bp, Artificial Sequence
  ENSG00000214870_5 (sequence is synthesized)
tcaaacactgtcgtggcttggcagcactacaaggcagagtgaaaacagatacttctacccacattcctatctcctctcatttacgcagattaaatgctttctttccttgttttacactgc

SEQ ID NO: 1041460 - DNA, 120 bp, Artificial Sequence
  ENSG00000214870_6 (sequence is synthesized)
gggagccccaggctgcgcgcgcccgcaccgcatcgccgctttgccccgcgaccgcgcgcgcctcctcgtcctcccccgcgcctttgtttccgtctccttctcctttccctcctcttttgt

SEQ ID NO: 1041461 - DNA, 120 bp, Artificial Sequence
  ENSG00000214870_7 (sequence is synthesized)
agttactgagcaactaagaagtcacaactgttttcagttttattaatgagttgttatacttattttatagatagagaattaccattataacattgctccattgcccactcatccattcac

SEQ ID NO: 1041462 - DNA, 120 bp, Artificial Sequence
  ENSG00000214870_8 (sequence is synthesized)
gcatctgtccatccgtccatccacccatttgtccactccccaaatggtcatcaattgtctactgtgagccaagcaaagtgctccttactttggactctgaatccagtgctctttctactt

SEQ ID NO: 1041463 - DNA, 120 bp, Artificial Sequence
  ENSG00000214870_9 (sequence is synthesized)
caccatagacacatgccccttgagtataagggagcttgattcattcaacaaatatctgttgtccatctccaatgtactggcatattctaaatgcatccaacaaaaaccaaaatgaaaaaa

SEQ ID NO: 1041464 - DNA, 120 bp, Artificial Sequence
  ENSG00000214870_10 (sequence is synthesized)
aagaaaaacccattccttcaaggggattgcattcggactgggggagacagataaaataaaaataatgaagtcaaatatatatgttagtgacatgtgccatgaagaataatgcccaatagg

SEQ ID NO: 1041465 - DNA, 120 bp, Artificial Sequence
  ENSG00000214870_11 (sequence is synthesized)
taaatggggcaattaacaaacgtaatgtaaataaattagttccaagaaatcattgactcaccaacagagggaacacaatttggtccatggtaaaatattccttggtattaataatttctt

SEQ ID NO: 1041466 - DNA, 120 bp, Artificial Sequence
  ENSG00000214870_12 (sequence is synthesized)
ctcctaaagtatttcaggggctgccaagctgctctcctgtttcctcttccttggggctgattgcatcccatgatgtgcccaggttttgagatgctcctcgtgaatgaaaataggactgtc

SEQ ID NO: 1041467 - DNA, 120 bp, Artificial Sequence
  ENSG00000214870_13 (sequence is synthesized)
tggttcctccatccatagcaagggagcctagacagaaataacttctgtgcatttctccagctacatttagggaaaactagaaaatacagaaatatatcaagaagaaaaaaaatttaaaaa

SEQ ID NO: 1041468 - DNA, 120 bp, Artificial Sequence
  ENSG00000214870_14 (sequence is synthesized)
atgttggtgcataatgaacaccacgtatggattgaaatcccatttacaggatgttcagttacggaacctgtaatcaggagaggcttgtcattcatgccttgacacctctcattcatctga

SEQ ID NO: 1041469 - DNA, 120 bp, Artificial Sequence
  ENSG00000214870_15 (sequence is synthesized)
gtctggcctgctggatatgcaaatgataggaggactgaaaatcataatccttcagccgtgatggcgtcaacgtcactattcttggaacaagccatttttaccagagatgtctccaagagc

SEQ ID NO: 1041470 - DNA, 64 bp, Artificial Sequence
  ENSG00000214870_16 (sequence is synthesized)
cctgccgcgtccgactgccagggatccctcacgccgccctgcaacttctgcctcccaggttcaa

SEQ ID NO: 1041471 - DNA, 120 bp, Artificial Sequence
  ENSG00000214870_17 (sequence is synthesized)
acttgggcttcgaagaccacttccctctgctccccagggccttccccactggcttcagaggcgtgactgagggcaagaaggaagagccaagattctgtctacatgtgtagtgaagtttgt

SEQ ID NO: 1041472 - DNA, 120 bp, Artificial Sequence
  ENSG00000214870_18 (sequence is synthesized)
aacacatttttaaagaatggacactggtattatattgtttatacaactctaaatgctgctttttcacttattacaattaggacttttttcatgttaataaatacttcctgaaaacataaa

SEQ ID NO: 1041473 - DNA, 120 bp, Artificial Sequence
  ENSG00000214870_19 (sequence is synthesized)
atgttggacagggcgcgtctgcgcctccggccgccgcggctcccggggcctccgcctgcagccggcggcggaacgagggcaggcggctgagacaggcgagctatttgcattccccggcag

SEQ ID NO: 1041474 - DNA, 120 bp, Artificial Sequence
  ENSG00000214870_20 (sequence is synthesized)
ggagaacacttgggcttcgaagaccacttccctctgctccccagggccttccccactggcttcagaggcgtgactgagggcaagaaggaagagccaagattctgtctacatgtgttacca

SEQ ID NO: 1041475 - DNA, 120 bp, Artificial Sequence
  ENSG00000214870_21 (sequence is synthesized)
ggagcgttcagtggttcaattcttgctccccagcactcatcttgcatgttggtgcataatgaacaccacgtatggattgaaatcccatttacaggatgttcagttacggaacctgtaatc

SEQ ID NO: 1041476 - DNA, 120 bp, Artificial Sequence
  ENSG00000214870_22 (sequence is synthesized)
agccctaagatgttggtgggagtatttcaaatggaattaacatgaagagatgcagagctgtatactatcatctgtgaaatatggagaaggacaagcaatacataaacagggaaaaagaga

SEQ ID NO: 1041477 - DNA, 120 bp, Artificial Sequence
  ENSG00000214870_23 (sequence is synthesized)
accctgccgcgtccgactgccagggatccctcacgccgcgagaaacccaacacacagctattctgtcaggctgccgagaaaaggctgttcggcagttgcagccctggtgaggcaatgagg

SEQ ID NO: 1041478 - DNA, 120 bp, Artificial Sequence
  ENSG00000214870_24 (sequence is synthesized)
aggaaaggtggacgcacctgcctggagtggttgaaggaaggcagtgaacatccacgctcctggggttggttttcctgaacctctgtagctgtgctgctcactggggcagccactgaccac

SEQ ID NO: 1041479 - DNA, 120 bp, Artificial Sequence
  ENSG00000214870_25 (sequence is synthesized)
aagaggctgccgagggcttgcagtgtggccaggccagaccaggatgttctccaagtgggaaatacacaccccattgtaaagaagactgtatggaaaaaagaatgtgaactggctcattca

SEQ ID NO: 1041480 - DNA, 120 bp, Artificial Sequence
  ENSG00000214870_26 (sequence is synthesized)
ccgcctgcagccggcggcggaacgagggcaggcggctgagacaggcgagctatttgcattccccggcagtcatttttatatgcggagaaacccaacacacagctattctgtcaggctgcc

SEQ ID NO: 1041481 - DNA, 120 bp, Artificial Sequence
  ENSG00000214870_27 (sequence is synthesized)
tcagttgtttgaaatttatgatgctttagataggctttggcctgagattgccttgaggaatggtgtaggtacacaaattaagaataaaaataagattgcaaaaaattgcaccacttaagg

SEQ ID NO: 1041482 - DNA, 120 bp, Artificial Sequence
  ENSG00000214870_28 (sequence is synthesized)
gaattagttgcttttttcattatcttgaataatttgttcttaaatgcatcagagggaccaaatcatagctgactgatcggctcgttataaataattctcacctattcctaaaagcggggg

SEQ ID NO: 1041483 - DNA, 120 bp, Artificial Sequence
  ENSG00000214870_29 (sequence is synthesized)
cctgttgtgcacttgctacctccgtttagagaatattgcacttcaagcccattggatttgaaagtaatagaaatggtctttttaaagccaatattctagaatgagcacttcattaaatcg

SEQ ID NO: 1041484 - DNA, 120 bp, Artificial Sequence
  ENSG00000214870_30 (sequence is synthesized)
agacccaccttttacccaaatttagctagactttaatgtgcatcacacatctctaatctgggcttttcctatagcctctttcaaaggacatatttgttcagccttatcagtgaggtattc

SEQ ID NO: 1041485 - DNA, 120 bp, Artificial Sequence
  ENSG00000214870_31 (sequence is synthesized)
aatcatgcttcccttgtatcaggcacctcaagggcaggagctaacacaaatgtgcttggtttttaatagctgaaaatatgtctacgtgaggttaactgtatttacccaatgccagatacc

SEQ ID NO: 1041486 - DNA, 120 bp, Artificial Sequence
  ENSG00000214870_32 (sequence is synthesized)
tgaaagagtgtgaaaaattaaggtaattattaatgtctccaaatagctggatgatggtgtcatatttgcaatgcatagattatgccatcatgtcagatttgggacactttgggaggttgg

SEQ ID NO: 1041487 - DNA, 120 bp, Artificial Sequence
  ENSG00000214870_33 (sequence is synthesized)
gaatgggatggggatgggtggcagtgaataacatcagacagggtggatacgtaattccaaagttggaattagtgtctctattttaacagcaattcctttacttaacagcaattcttttct

SEQ ID NO: 1041488 - DNA, 120 bp, Artificial Sequence
  ENSG00000214870_34 (sequence is synthesized)
gaattaaatctttttttaaaaatgtggccacaaagaacatttaaatttacacatgtggttcacattatatctctgtgggatcgcacttaagacccaaccccacccatcctctaactctgc

SEQ ID NO: 1041489 - DNA, 120 bp, Artificial Sequence
  ENSG00000214870_35 (sequence is synthesized)
cctctcagcttgctctacaggtactttggaacagggcagggatggagggaaggtccttgtatcttagggatcaaatgcccaggaaaataattaggaggtgtttgggattatgctgaaaac

SEQ ID NO: 1041490 - DNA, 120 bp, Artificial Sequence
  ENSG00000214870_36 (sequence is synthesized)
cctgacaacactgaatagcagatgtctctttcttttccctttgttcactgtaaagaaaaacttacactcccccacagccatgccacaattccatggaccaaccattcatgtgtgaaggtg

SEQ ID NO: 1041491 - DNA, 120 bp, Artificial Sequence
  ENSG00000214870_37 (sequence is synthesized)
ggcctctaggagtgttttgtgccttttaggagttatttgtggcacactaaacttgctgacatgccatttagaaaagtgaatactgtgtacgcactgtaacaactattccataagtatttt

SEQ ID NO: 1041492 - DNA, 120 bp, Artificial Sequence
  ENSG00000214870_38 (sequence is synthesized)
tcacaggcttcggagtaggggctcccggagtatgcattgacacgatgcgctgcaaatgatccgggcgtggggaagtccccgagtgtgcattgattccacacacggccacggctcctacag

SEQ ID NO: 1041493 - DNA, 120 bp, Artificial Sequence
  ENSG00000214870_39 (sequence is synthesized)
ggcttttatggtgcagctcgccaatgatccgtgtgttaaagactccccaaatacacattgacacgatagactggagttgtttgggtctatcgtggcaatgatccggggataatggcagtg

SEQ ID NO: 1041494 - DNA, 120 bp, Artificial Sequence
  ENSG00000214870_40 (sequence is synthesized)
tcttatacaatttcactgagattggagtgctcatggtcctaatggcagaaccggaactgccccagttaagtcccaccatggcgcccagtaaagggtgtgtgggtctttgaccttctgctt

SEQ ID NO: 1041495 - DNA, 120 bp, Artificial Sequence
  ENSG00000214870_41 (sequence is synthesized)
catgacactgtggcattgctaattttactgatattttaactaacataattgagttagcatttttttccccctgaaaattcatttttgtaattcaacacctgaattagggagtccatctag

SEQ ID NO: 1041496 - DNA, 120 bp, Artificial Sequence
  ENSG00000214870_42 (sequence is synthesized)
tgatggtttcatttggttaatcataagctaaagacctaggaaaggtcattcttaaacctaaagtgttttgggaaaaataatcgtgggagatgcatatgagcttgagacagagttaatatg

SEQ ID NO: 1041497 - DNA, 120 bp, Artificial Sequence
  ENSG00000214870_43 (sequence is synthesized)
gaataaataacctcagtcctgagaaaacctagttggctaggctgaaatagacaagatgagaaggtgggaagaagatgtttttaaaaataatgaaagtaacatattcaataaaaataattc

SEQ ID NO: 1041498 - DNA, 120 bp, Artificial Sequence
  ENSG00000214870_44 (sequence is synthesized)
aaacactgtagaagtgtatgaaataaaaaacagaatcctcccactccttccttccttctttctataccattcactgttacaagcactattaatatttttgtatattcttccagtaactta

SEQ ID NO: 1041499 - DNA, 120 bp, Artificial Sequence
  ENSG00000214870_45 (sequence is synthesized)
aaaacacatgcaaatatatacagtcatgcatctcttaatgatgggaatatgttctgagaaatgcatcgttaggcgatttcatcattgcacgaatatcagagaatgtacttatacaaacct

SEQ ID NO: 1041500 - DNA, 63 bp, Artificial Sequence
  ENSG00000214870_46 (sequence is synthesized)
atcattgcacgaatatcagagaatgtacttatacaaacctagatggtgtagcctactacgtac

SEQ ID NO: 1041501 - DNA, 120 bp, Artificial Sequence
  ENSG00000214870_47 (sequence is synthesized)
cctctcaattttagagtcttccaatagaaagcttgttcttgtctctgtctccagagtgaagtttgtctccctgacagttaatcctgagacagccttccattgccttgataggcttgtcat

SEQ ID NO: 1041502 - DNA, 120 bp, Artificial Sequence
  ENSG00000214870_48 (sequence is synthesized)
gactcagccccagaaaccagccaccctgccgcgtccgactgccagggatccctcacgccgcgaggaagagacactagagagacactcagctgcagtgagaatacacaggcatcttcaagt

SEQ ID NO: 1041503 - DNA, 120 bp, Artificial Sequence
  ENSG00000214870_49 (sequence is synthesized)
gaatttactaaagtcatgctatacgctaggcactgtggagggactgcagaaagacttcaaggactgcaccgtcttgttagaaagatgcctagacaacatttgagaaacgctgatcatgtc

SEQ ID NO: 1041504 - DNA, 120 bp, Artificial Sequence
  ENSG00000214870_50 (sequence is synthesized)
tgatgacacataactgctaacagttacatggaattttctatatgctatatacaaacatacaaatatatgtatgtatatttactcagctctcacaacagctactactgttattatgaatcc

SEQ ID NO: 1041505 - DNA, 120 bp, Artificial Sequence
  ENSG00000214870_51 (sequence is synthesized)
tgttttatagtgagaaaactgaaacatggagaggttaagtaatttgcccaagatcacatagctactaagtggtggaactgtgattagaatccaggcattcaggctccagagttcatactc

SEQ ID NO: 1041506 - DNA, 120 bp, Artificial Sequence
  ENSG00000214870_52 (sequence is synthesized)
ttcacataccacatctatcttgaatataacaatgtagagaaaaagaattatagcaagcatatgtctaggtaagcattttccagaagtgactgtttttttgcattgggtttgtaaactttc

SEQ ID NO: 1041507 - DNA, 120 bp, Artificial Sequence
  ENSG00000214870_53 (sequence is synthesized)
aacaataaagcaggttggactttatatcagtcaaagcagaatattctgatgtcaccttccccaatgtttaggatgttaatgagaattgctaatccaagagaagaaaataatctcatctaa

SEQ ID NO: 1041508 - DNA, 120 bp, Artificial Sequence
  ENSG00000214870_54 (sequence is synthesized)
agaaggcagctaaccaaagggacttcagcatctggaagactggactgaggcgggggtgtacttgacaggggtggctactgaccacacacctccttgaaaggtgtcgtggctcattaccag

SEQ ID NO: 1041509 - DNA, 120 bp, Artificial Sequence
  ENSG00000214870_55 (sequence is synthesized)
gggccttccccactggcttcagaggcgtgactgagggcaagaaggaagagccaagattctgtctacatgtgtgatcgacaatgttaattctcatattgtacattgtgccatctctccctg

SEQ ID NO: 1041510 - DNA, 120 bp, Artificial Sequence
  ENSG00000214870_56 (sequence is synthesized)
ctgatctacctctgcgggtgctggtaaggattaaataagaagatacatgcagacccagcatggtgccgagcacactaagcattcagcaaatggggtcaagatttgagcacctaagacact

SEQ ID NO: 1041511 - DNA, 84 bp, Artificial Sequence
  ENSG00000271843_0 (sequence is synthesized)
tatccctgcactacccccaatattgtgcatgtgaggttgatggttaacagcctcctgtgttaatcaactaagacaggggtgtcc

SEQ ID NO: 1041512 - DNA, 120 bp, Artificial Sequence
  ENSG00000271843_1 (sequence is synthesized)
gtcttgggtgacacaaaatacgctaaggatagctgatgagctcaaaacaaaacagctcataatgttttaagaaaacttacaaatgtgtgttgggccacattcaaagctgttgtgggctct

SEQ ID NO: 1041513 - DNA, 120 bp, Artificial Sequence
  ENSG00000271843_2 (sequence is synthesized)
gcttgagctaggagaaactatccaaagaattcctaacctttatcctgtctctagtagctttaactggtacagcttgttttctgaaagtcttaattttctgcttttattcaagaaggttac

SEQ ID NO: 1041514 - DNA, 120 bp, Artificial Sequence
  ENSG00000271843_3 (sequence is synthesized)
ttcacaatatgaaaataagattatgaaatgatgctaaaacagttatacatagttcctttttcatgttggtaaatgttttcttttgaagtgggaaacaatcttatttttaaccctggtttc

SEQ ID NO: 1041515 - DNA, 120 bp, Artificial Sequence
  ENSG00000271843_4 (sequence is synthesized)
agtcaaaagtaactatcctagtgtgaaatgatatcgccaggataaactatcttttgtgattatttttaaagcagaaatgccagtttctcttacctcagtaaaagttgattttatagcaaa

SEQ ID NO: 1041516 - DNA, 120 bp, Artificial Sequence
  ENSG00000271848_0 (sequence is synthesized)
agttgctaaagccaggccagtgagacatagagctgagacaggcaatgggagccctggattaggggaagagaagaggagagaggtccataccgctgcacagtgaggacaagctgatttcct

SEQ ID NO: 1041517 - DNA, 120 bp, Artificial Sequence
  ENSG00000271848_1 (sequence is synthesized)
gaggcatcgatgaggctcatggcactggcatgggagaggttggtgcaagagaccccattgattgccaagagctggtccctctctcggagtcctgctctgccagcctggctccgtcttcga

SEQ ID NO: 1041518 - DNA, 120 bp, Artificial Sequence
  ENSG00000271848_2 (sequence is synthesized)
caacttcagagaaattaggaagctgggaagccatgtaaaccaaaagcaggagacaccagcagaaccaacgcaggaagccagggaagtgcagaagaacagggcagggggcaacccaggggg

SEQ ID NO: 1041519 - DNA, 120 bp, Artificial Sequence
  ENSG00000271848_3 (sequence is synthesized)
gaatcttcactgttgccagcaacacacactcccagcaggagaggaccctcagagtgagaacgcagagctggagaagtgaagaaggagcaggtggtgcccggggaagtccaggggtgtggg

SEQ ID NO: 1041520 - DNA, 120 bp, Artificial Sequence
  ENSG00000271848_4 (sequence is synthesized)
actgtagggacctcgcgctgacatctgggaaatgccattcatactggaacctccgacacactgccatgaatgtgagggtttcgtgactgatggggagactgcagtcaaataaaacagata

SEQ ID NO: 1041521 - DNA, 120 bp, Artificial Sequence
  ENSG00000271848_5 (sequence is synthesized)
ctacacgcactcgtcggggcagccgtactgcagaagcacgttgatgcactcctggctggaggcctgccgggcgtaggtcagcgctgtgttcccgtgggcatctcgggccatgacgtccac

SEQ ID NO: 1041522 - DNA, 120 bp, Artificial Sequence
  ENSG00000271848_6 (sequence is synthesized)
cccgtaccagatcaggagctgtgccaggaccacattccccttgcggcaggccagatggagcgccgtgcagccgtctccctccccacaggtctcgttcacctcctcacgggagccatgtgc

SEQ ID NO: 1041523 - DNA, 120 bp, Artificial Sequence
  ENSG00000271848_7 (sequence is synthesized)
aggatggctgtctgcaggtcctcatcagcggtggcccgcagcaggtgctggcccagggacagctcagtgcagggtagtggggccagaaagagcttctcctcatatttggaacggatccac

SEQ ID NO: 1041524 - DNA, 120 bp, Artificial Sequence
  ENSG00000271848_8 (sequence is synthesized)
cgttccttctcttccctcgtggactttactgagggttttgtctgcccctggctgctcccttcccagatgctgttggctaggtcattgccaatagatgacataaccttcctgagctcaact

SEQ ID NO: 1041525 - DNA, 120 bp, Artificial Sequence
  ENSG00000271848_9 (sequence is synthesized)
ggccagtcatccagctccagagatcgcacacgggaaaggcgggtgccaagactgcggtggattcctgagcattcaatacacatgaggactcccaagttcaaactggcccacttaggattc

SEQ ID NO: 1041526 - DNA, 120 bp, Artificial Sequence
  ENSG00000271848_10 (sequence is synthesized)
tgggtctcatagtccacacagtgggcgttcccacgcatgttttggatcgactgcagggccatggcctcgctctggctggtcagctgggacttgcttttactgctctcgcatgactgcagg

SEQ ID NO: 1041527 - DNA, 120 bp, Artificial Sequence
  ENSG00000271848_11 (sequence is synthesized)
ctggccaggatctggctctggatggcttggacccaggcatcccgctcctcatacgtcgtggcttcaaagtgccatgtttggccagtggcagacacaatcataaagttgttggtgcttttc

SEQ ID NO: 1041528 - DNA, 120 bp, Artificial Sequence
  ENSG00000271848_12 (sequence is synthesized)
tgatgccttgcatgctttaaaggacagacgtcatgaatgccaagacttttgtggcggtccatcctgccagtgtcttctcccacttttgctctgtggatttgagctcacagtttgtgctgt

SEQ ID NO: 1041529 - DNA, 120 bp, Artificial Sequence
  ENSG00000271848_13 (sequence is synthesized)
gcccaccacctgcccaccctaacgagactcctggagacttggctggccagtcaccagaggaagaggggcccagcagcatgccagcattcacccacctgtgggtatcagtcaggctcctgg

SEQ ID NO: 1041530 - DNA, 120 bp, Artificial Sequence
  ENSG00000271848_14 (sequence is synthesized)
tggaagccagaggacatattcgaatgggtatttgaggaaaggggctgttcacagaagtgtggacagagttaagagaaccagtaagagatgaggaatgtcctggaccagcaagagtgggag

SEQ ID NO: 1041531 - DNA, 120 bp, Artificial Sequence
  ENSG00000271848_15 (sequence is synthesized)
ctgttatctccctgggtctaggaaaggtgtccacagatcccaaagagagctgtggctgtagaggaggatcatcaggagctgcagccatcagtagaaagatgtggccactgccaaaccagc

SEQ ID NO: 1041532 - DNA, 120 bp, Artificial Sequence
  ENSG00000271848_16 (sequence is synthesized)
aaggaagaatctgagcaaataaccacctctcctctctctctcccacctcctatgacatcctccactgtttgaattccactagggccagacagtgaggcaccctggtgatgcagtccaaga

SEQ ID NO: 1041533 - DNA, 120 bp, Artificial Sequence
  ENSG00000271848_17 (sequence is synthesized)
gggagtgggcagagaggagccagtgggtatggaggggaaacagagaaacagaattccagctcactctgtgggatttctgggtctgatagaaacatggcattattattattattattatta

SEQ ID NO: 1041534 - DNA, 69 bp, Artificial Sequence
  ENSG00000271848_18 (sequence is synthesized)
gcctcccaagtagctgggattaccggcacatgccaccacgccttgctaaattttgtatttttggtagag

SEQ ID NO: 1041535 - DNA, 120 bp, Artificial Sequence
  ENSG00000271848_19 (sequence is synthesized)
gcatgagccactgtgcccagcctgcagcagctaaattttacagtgtctcttttctccttctggaaactatatggaacaacaacaagactgaggaggaggagaaggaggaggaggaggaaa

SEQ ID NO: 1041536 - DNA, 120 bp, Artificial Sequence
  ENSG00000271848_20 (sequence is synthesized)
ctgaagccgagtgggttctgagaggcagaggggcagtggtacagaggtgaggctgacacttctgtgcaggaagggcaggctcctgaggaagggagccccgaatgctctccactagattcc

SEQ ID NO: 1041537 - DNA, 120 bp, Artificial Sequence
  ENSG00000271849_0 (sequence is synthesized)
tgctagtgaatccttcattactctaatcctctattatagttaacaattctttttattaagccttccctgtcccgggagtagtcccaagaaatagacctgcaaagatgggattaaaggtca

SEQ ID NO: 1041538 - DNA, 120 bp, Artificial Sequence
  ENSG00000271849_1 (sequence is synthesized)
gtttgattgaggttttgagctttagctccttgccaaagggaaatgtaattcatgacatgctgggcatctcaattaagcaattacctgtggttgatcctgatgaagtgccaactgaagcct

SEQ ID NO: 1041539 - DNA, 120 bp, Artificial Sequence
  ENSG00000271849_2 (sequence is synthesized)
aagatgactagaaagactggtgtgggatggattcttttgcgtgcttttgagtggttataaagagaaatgacaagcacaggttttttaactctcagagttatggtatgagaaccagagata

SEQ ID NO: 1041540 - DNA, 120 bp, Artificial Sequence
  ENSG00000271849_3 (sequence is synthesized)
ttctgcagaattccaaaagctctggtttattgtagcaacaagaattatgctgagaatcaaacaaaattttaattttcatgttactgaattataactgctattaaattcacacatattctg

SEQ ID NO: 1041541 - DNA, 120 bp, Artificial Sequence
  ENSG00000226130_0 (sequence is synthesized)
aaggaaataaatagagaaatttcaaggccatctcatcagaagcacaattattactaaagtctcctaatgagcatctgggagcaacttgatacatgctttctgcttgttcaagcaagaggg

SEQ ID NO: 1041542 - DNA, 120 bp, Artificial Sequence
  ENSG00000235741_0 (sequence is synthesized)
acagaaaggaaacagaggctcagagaagctaagacatttgcacaggaccacagctgggctgagaagaaaaattgaatactgatgagaaagaagatggatagaagagagagacatgcaact

SEQ ID NO: 1041543 - DNA, 120 bp, Artificial Sequence
  ENSG00000235741_1 (sequence is synthesized)
gggactctaacagaaatgccattctccctgggaagggactagcccagtcagcagccacctcactccatgagttggttctgaggcaccctctgtgccaggcagctcgggacacaaggtgaa

SEQ ID NO: 1041544 - DNA, 120 bp, Artificial Sequence
  ENSG00000235741_2 (sequence is synthesized)
cagatggagagcccaagcactttctgctctaggttccctccctctgctgcagttgggagaggctgggctgggaagcccacatgagccgttgcagctccctgcaagggactctcacctcct

SEQ ID NO: 1041545 - DNA, 120 bp, Artificial Sequence
  ENSG00000235741_3 (sequence is synthesized)
ctctcaggcctcctctccctgggctcctggcctggcccttcacacctttctccaactccatcatgactgcaggctttggccttccctcaggaaaagaacgaatttttctccacaaaattc

SEQ ID NO: 1041546 - DNA, 120 bp, Artificial Sequence
  ENSG00000235741_4 (sequence is synthesized)
tataatctcttccagcctctccttttagctactgtcatatccattcacctaagtgataacagaagaccacaagtcagatgactcatatattcacctattcaataaacactccagagcatt

SEQ ID NO: 1041547 - DNA, 70 bp, Artificial Sequence
  ENSG00000259442_0 (sequence is synthesized)
gagccaggctgggctcaaactcctgacctcagctgatccgcccacctcggcctcccaaggggctgggact

SEQ ID NO: 1041548 - DNA, 120 bp, Artificial Sequence
  ENSG00000259442_1 (sequence is synthesized)
acaggcgtgagccaccacgcccggcccctacccatcctttaaagggatactccgaatgtctatgaacactcagataaaactgaactaaatttgaatccacttgtactacatttatttgtc

SEQ ID NO: 1041549 - DNA, 120 bp, Artificial Sequence
  ENSG00000259442_2 (sequence is synthesized)
tgaactaaatttgaatccacttgtactacatttatttgtcaactcttcgtttgtctacttcttgagaactttaacagctgtactgggttggttagtgtcgcccccaaaattcatgtcctt

SEQ ID NO: 1041550 - DNA, 120 bp, Artificial Sequence
  ENSG00000259442_3 (sequence is synthesized)
cctggaacctcaaaatgtgaccttatttggaaagagtgtcattgcagatgtgattagtcatgatcaggtcatactggagtaaggtgagccttttacctaacaggactggtgtccttataa

SEQ ID NO: 1041551 - DNA, 120 bp, Artificial Sequence
  ENSG00000259442_4 (sequence is synthesized)
acagagacacacagggagtataccatttgataacagaggaagagaatggagtaatgcagctacaagcgaaagtacaccaatgattgctggctcccactagaagctaggaagaggcaggaa

SEQ ID NO: 1041552 - DNA, 120 bp, Artificial Sequence
  ENSG00000259442_5 (sequence is synthesized)
ggattctatccagagtctcagaagaagcaagaccccactgacatcttgatttctgacttccagactccagaaagcgagaaaatatatctgttgttttaagctatccagtgtgaggtactt

SEQ ID NO: 1041553 - DNA, 120 bp, Artificial Sequence
  ENSG00000259442_6 (sequence is synthesized)
ggttatggcagcttcagaaaactaatacaacagcaatttcaatttctactttatcttcctagccccaagagtaccatgtggctattagagtacaggattatgtaggctctcaaatccctt

SEQ ID NO: 1041554 - DNA, 120 bp, Artificial Sequence
  ENSG00000259442_7 (sequence is synthesized)
ccatggtaaaagaatgattgggcttccagcagtggccaagaattgccagacgcttatgagcgcctgctgcgagatgcttgtacagtgaatgctcaataaagtggtggccattataaccgc

SEQ ID NO: 1041555 - DNA, 120 bp, Artificial Sequence
  ENSG00000259442_8 (sequence is synthesized)
aagcaatgagactacataaatagtaagaaacgaaatagaacaaggggcagcgggagcaaagagagaaacaagggcagctgaggaaggaagcctcaattccccggaggacatccgcgggcg

SEQ ID NO: 1041556 - DNA, 120 bp, Artificial Sequence; identical to SEQ ID NO: 831726
  ENSG00000259443_0 (sequence is synthesized)

SEQ ID NO: 1041557 - DNA, 120 bp, Artificial Sequence; identical to SEQ ID NO: 831727
  ENSG00000259443_1 (sequence is synthesized)

SEQ ID NO: 1041558 - DNA, 120 bp, Artificial Sequence
  ENSG00000259443_2 (sequence is synthesized)
agatggaggccaggaaacaagacacacaaccattttccatcatcgaggggcaaggcagggcttggcatgaggcagaaccaggctccatcaatgccacatgtcaggaggaacctcttttct

SEQ ID NO: 1041559 - DNA, 120 bp, Artificial Sequence; identical to SEQ ID NO: 831729
  ENSG00000259443_3 (sequence is synthesized)

SEQ ID NO: 1041560 - DNA, 120 bp, Artificial Sequence; identical to SEQ ID NO: 831730
  ENSG00000259443_4 (sequence is synthesized)

SEQ ID NO: 1041561 - DNA, 120 bp, Artificial Sequence; identical to SEQ ID NO: 831731
  ENSG00000259443_5 (sequence is synthesized)

SEQ ID NO: 1041562 - DNA, 120 bp, Artificial Sequence; identical to SEQ ID NO: 831732
  ENSG00000259443_6 (sequence is synthesized)

SEQ ID NO: 1041563 - DNA, 120 bp, Artificial Sequence; identical to SEQ ID NO: 831733
  ENSG00000259443_7 (sequence is synthesized)

SEQ ID NO: 1041564 - DNA, 69 bp, Artificial Sequence
  ENSG00000259446_0 (sequence is synthesized)
agagacagagacagagagagagagagaggaaagagagagacagagacagagagacagagagaggaggac

SEQ ID NO: 1041565 - DNA, 120 bp, Artificial Sequence
  ENSG00000259446_1 (sequence is synthesized)
agagagagatctggactcgaataccttgctaggacccgcgtgcattgttgggcaaggagaagacggtgcagtgaggagcgagggtgattgtccacttacaacaaagtttgcaactccctg

SEQ ID NO: 1041566 - DNA, 120 bp, Artificial Sequence
  ENSG00000259446_2 (sequence is synthesized)
gatagtcctttctacaccttaagagaaccccttcccctcttcaaaattgctcaagaagattaatgtccacctcaaggctaaaacctgagcagtttggaatacccaccctcccacagccat

SEQ ID NO: 1041567 - DNA, 120 bp, Artificial Sequence
  ENSG00000259446_3 (sequence is synthesized)
tgcagctgtcatgtgagttcacttggtgagagatacagacaggagaaacgtccatgcaccattcaagctggaacctgttctctgcagcctggtgcctttcattggtccatagaaccacaa

SEQ ID NO: 1041568 - DNA, 120 bp, Artificial Sequence
  ENSG00000259446_4 (sequence is synthesized)
agcccatcagattctggaattttccttcagttagagaaactggcaggatatgaaacctatttttacagcataagttcttcagtgaagatttatgactggtgaatagaacccaatgtgtcc

SEQ ID NO: 1041569 - DNA, 120 bp, Artificial Sequence
  ENSG00000259446_5 (sequence is synthesized)
tatctgtgtacatgctctattctagtacactgttcaagtcctgactagagtatggttacaaatgctgattcaaagctcatctctatagcttaccagctgtgagaacttgagcaaatttcc

SEQ ID NO: 1041570 - DNA, 120 bp, Artificial Sequence
  ENSG00000259446_6 (sequence is synthesized)
tatactcgaccggcctcaacttccctatctgtaaaatgggaataacagtaatactacctgaaaaggttgtggtgaaaattaaatgatataatgtataccaagtacttatttagcgtgggt

SEQ ID NO: 1041571 - DNA, 120 bp, Artificial Sequence
  ENSG00000259446_7 (sequence is synthesized)
gcctgacacagcaaaagatctgaaaaaatgttaactacttttttgtgttaggcagaatcatggggctggaaagagactttctgttcttatttggtagttaatatttaatatgctacgctc

SEQ ID NO: 1041572 - DNA, 120 bp, Artificial Sequence
  ENSG00000259446_8 (sequence is synthesized)
ccactgcccttgctaagaatgggaatggaaaaagcagatcatgtcttgcttctttttcatcctcatcgacagcccaaagaatgaaaatagaaggaggaaaagaatctcttattcactaaa

SEQ ID NO: 1041573 - DNA, 120 bp, Artificial Sequence
  ENSG00000259446_9 (sequence is synthesized)
gaaaatatgcctccactttgaccgtctgctgtgtgtgagtttgcgacaatcccctactatccaacaagattgtgtttgtgttttaacaggagcttctctcgctagagcagaaaggacaca

SEQ ID NO: 1041574 - DNA, 120 bp, Artificial Sequence
  ENSG00000259446_10 (sequence is synthesized)
gcattggccgggcagcatgtttgtttgtttgccctgagtcctggggcagctagttatcttgggcagagttagttttcgggtctggagccaggaaaacacactccttaatgcccacatatt

SEQ ID NO: 1041575 - DNA, 120 bp, Artificial Sequence
  ENSG00000259446_11 (sequence is synthesized)
tgcagtgcgacacatagcttggaagcttgtcacacctattgcaaccgctgcgtgacctgtctcccaggaaagattgtctccatgagatattcttagggatgaatgcggtgagaaacgtgt

SEQ ID NO: 1041576 - DNA, 120 bp, Artificial Sequence
  ENSG00000259446_12 (sequence is synthesized)
acaccactcgggacagcagccacataacttcagaggttcgtccgctcacaggcccctgcggtctgggctgtgccggtggtctgcctaggaaactgccttcagtacgcaggggactgtgag

SEQ ID NO: 1041577 - DNA, 120 bp, Artificial Sequence
  ENSG00000259446_13 (sequence is synthesized)
ttgcccagtagctgcatttgagaatcaaagcaccgatttcaggcagcgataggctgtttgtctggagacgggcgtggagactctgctttcatgttcgcctgctgaaggaatagaaggcag

SEQ ID NO: 1041578 - DNA, 120 bp, Artificial Sequence
  ENSG00000259446_14 (sequence is synthesized)
gatgaactcagactgaatggctggctctgatatgtgtttgaatgaaaaccaaagtaaacaccaccatttcaccaatggcacacagatggactcctgcttgacgccacgagaggaaaacta

SEQ ID NO: 1041579 - DNA, 120 bp, Artificial Sequence
  ENSG00000259446_15 (sequence is synthesized)
aaaatgaaatcagccagaataactatttttgttattagttataatgattttaaaacaagcaattctattgttttaaaagagagcatcaaaataacaggaaaattggaaagaaagtagcaa

SEQ ID NO: 1041580 - DNA, 120 bp, Artificial Sequence
  ENSG00000259446_16 (sequence is synthesized)
ccaatagagtcaacccctcactctaagatgaggaaactaaggccccctaaggtgaactgtgaactgaattgatgaaagctgggatcaaagcccagatctctgggctccttgtctggtatt

SEQ ID NO: 1041581 - DNA, 120 bp, Artificial Sequence
  ENSG00000259446_17 (sequence is synthesized)
tatcttccctgctttcttcataattaaattcagtgtaatgacgcagacgtagagcaagatcctggagtgtcttcttaatcatcaaatattgtcctctataaagttataatgtttagtgaa

SEQ ID NO: 1041582 - DNA, 120 bp, Artificial Sequence
  ENSG00000259446_18 (sequence is synthesized)
accgcaccgcacactcagcggaggcgcgcgccccgcggcgaccggaggatgtcccctaaactgctccaattcacaaacaaaggtgttccaaggcaagaagttattttcaccagggaagcc

SEQ ID NO: 1041583 - DNA, 120 bp, Artificial Sequence
  ENSG00000259446_19 (sequence is synthesized)
caccagggaagcctgtgaacagaaagagctcctgagactacacctgcttttaatttggtgtcagtaggaacgatgctcaagaagattaatgtccacctcaaggctaaaacctgagcagtt

SEQ ID NO: 1041584 - DNA, 120 bp, Artificial Sequence
  ENSG00000259447_0 (sequence is synthesized)
cgaatcatcattgtaatggcaactttagctgtcagggatcctgttgcagctctgcctcagccagtctgtgcacagagcatggagcaccagggccatggagcatgtgggctatggaatcgg

SEQ ID NO: 1041585 - DNA, 120 bp, Artificial Sequence
  ENSG00000259447_1 (sequence is synthesized)
ttctattttctgagttttaaaaatgtctgaacccctggaagacccagccagaccaaatctgctttttctcctggatccataatgtacagtggtaaattaaaggcttcgagaagctctgta

SEQ ID NO: 1041586 - DNA, 120 bp, Artificial Sequence
  ENSG00000259447_2 (sequence is synthesized)
catcacttgctgggcaaccttgactcaatgaatgacatcataaaaatggaacattcaaatgagaatgtccaaggacctgctgacttcactgatgaattctaccaaatatttaaagaagaa

SEQ ID NO: 1041587 - DNA, 120 bp, Artificial Sequence
  ENSG00000259447_3 (sequence is synthesized)
ctcatattttccaaaaaaccaaagaggaaggaatacttccaaactctttttacaaggcaagcattaccctgataacaaaactagacaaggacactgcaagaagagaaaattatagtccag

SEQ ID NO: 1041588 - DNA, 120 bp, Artificial Sequence
  ENSG00000259447_4 (sequence is synthesized)
aaagaccattcaccgtgattacatgggatttaaccctagggtgcaaggatggctcaacatatgcaaatcaataaatgttatacaccatattaacagaagggataaaaaccatatgatcat

SEQ ID NO: 1041589 - DNA, 120 bp, Artificial Sequence
  ENSG00000259447_5 (sequence is synthesized)
ctcaatagtttcagaaaaagcatttgacaaaatgcaacattttttcctgattaaaaactctcaacagattcggtatagaagaaatgtacctcaacacaatgaagcccatatactgcaaac

SEQ ID NO: 1041590 - DNA, 120 bp, Artificial Sequence
  ENSG00000259447_6 (sequence is synthesized)
ccatagctaacatccaactcagtggtgaaaagttcagagatttttcctctaatatcaggttcaagaccaggatgcccactctcatcacttctatttaacatagtactggaatttctagcc

SEQ ID NO: 1041591 - DNA, 120 bp, Artificial Sequence
  ENSG00000259447_7 (sequence is synthesized)
agagcaattagacaaaggaaggaagtaaaagatgccaagaacacacaatggggagagaagactttgctaagttgtgctcagaaaactggatattcacatgcagaagaataaaattagacc

SEQ ID NO: 1041592 - DNA, 120 bp, Artificial Sequence
  ENSG00000259444_0 (sequence is synthesized)
tggtcactcgctcaggctgctctagaggccccatagccagggcccggctctgagggccccacgggccagcttctcagggggctgtgttcttcctgggccaaggctgcgtgctcagcagcg

SEQ ID NO: 1041593 - DNA, 120 bp, Artificial Sequence
  ENSG00000259444_1 (sequence is synthesized)
ctcttcacaacacccctgccctgctgggcgccggcccccatgccaagcatgaaggggcaccggggagagagaagcgagtggaggctgggacagatggtgccctgaagtgtgggtcaagtc

SEQ ID NO: 1041594 - DNA, 120 bp, Artificial Sequence
  ENSG00000259444_2 (sequence is synthesized)
cgaatcaggcagggtccctgaaccctggcgctgggggaagtcgccgacctgtggccagggcggggctgataaagctccatcaatcacttgactgtctctccttcctcgggcctccatcca

SEQ ID NO: 1041595 - DNA, 120 bp, Artificial Sequence
  ENSG00000259448_0 (sequence is synthesized)
cggccgccgccaagcagatacaaatgtttatttggtctgactttgaaatacctcggagcagctgaaataattgaaggcagccctgtaagaagcagcacttccagaccttctcacgggcaa

SEQ ID NO: 1041596 - DNA, 120 bp, Artificial Sequence
  ENSG00000259448_1 (sequence is synthesized)
acctcgagattgccctgcggactggcacttctcgagggaagtcatcgcagctgccatggagccagcatttgtcggggacctggcacgcaggccaccggctctgggagagggctgaggagc

SEQ ID NO: 1041597 - DNA, 120 bp, Artificial Sequence
  ENSG00000259448_2 (sequence is synthesized)
cgtggggctcacgtttcagggattagcttgtgtaacttgacttgttcccccaaattctacaagtacagagaatatgcagaaatctgtgagagaaacaaccttctgcagctcgttgttgtg

SEQ ID NO: 1041598 - DNA, 120 bp, Artificial Sequence
  ENSG00000259448_3 (sequence is synthesized)
gtccggaggagggagccgcccagacctagcccgggtggggcgaacgaagagcgggcgtggtgggcgcctgctagctccggctcgcggtgttaggccttggggacatcgctcggggacagg

SEQ ID NO: 1041599 - DNA, 120 bp, Artificial Sequence
  ENSG00000259448_4 (sequence is synthesized)
gccgccccgagccgtggccgggaaggggaacacagtccatgcgtgcggcgcccgacagcctctccccgcacgcccgagccccagtgcaggcggcggcccggcccctttgtgcctggagtg

SEQ ID NO: 1041600 - DNA, 120 bp, Artificial Sequence
  ENSG00000259448_5 (sequence is synthesized)
ctttgtgcctggagtgtcacgcgcgggcgctcctgccgccgcgcctgggagaggcctccggcaccccgggcccctttccaagcacaacagcagccctgccgcggccccgcgctgacccac

SEQ ID NO: 1041601 - DNA, 120 bp, Artificial Sequence
  ENSG00000259448_6 (sequence is synthesized)
tttccctcctgcctcctcagcccgaggccgagaatccagcggccgccgccaagcagatctcatcccatcagttgaagaccttaagagaaaagagactgacctgctctgagcaaggaggaa

SEQ ID NO: 1041602 - DNA, 120 bp, Artificial Sequence
  ENSG00000259448_7 (sequence is synthesized)
ttctgctggccaactgcttgtgaactccaacttgtaatatcggtctccagcctaccggcttactctgcagattttggatttgccaagcctccacaaccgcagaagccaattccttaaaat

SEQ ID NO: 1041603 - DNA, 120 bp, Artificial Sequence
  ENSG00000259448_8 (sequence is synthesized)
gaatcccttacaacagttccctaaaataaattcttcaaaattccttaaaataaatgtgtgtgcatgtgtgtctgtgtatatatatagcctatgtaatgtctaatatagatctataatata

SEQ ID NO: 1041604 - DNA, 120 bp, Artificial Sequence
  ENSG00000259448_9 (sequence is synthesized)
tattagataaatatacacatacttatcatatatatatgtgtgtgtgtgtgtgtgtttctcctattggttctgttctctggagaacctaatacagaaacaaatctgtttattcttctagcc

SEQ ID NO: 1041605 - DNA, 120 bp, Artificial Sequence
  ENSG00000259448_10 (sequence is synthesized)
tctgtatcatcaggcctctttgttagagcaggtgagctttaccctaactaattcagaggttgattcgttttcatgcatgtagatacttgtcatttagcttctattatctgcctgtatttt

SEQ ID NO: 1041606 - DNA, 120 bp, Artificial Sequence
  ENSG00000259448_11 (sequence is synthesized)
gaatgttatatattaagtatattaaccttttgactattatatatcttgcaaacatcttgtaatcagtcacttgtctctttattttatttggagcggctttcaacctagagcagtggtccc

SEQ ID NO: 1041607 - DNA, 120 bp, Artificial Sequence
  ENSG00000259448_12 (sequence is synthesized)
caaacccggggctgcagactattccctgtctgtggtttgttaagaaccaggctacatagcagaagatgagtagcaggcgcgggagcatgaccacctgagctccgcctcctgtcagaccag

SEQ ID NO: 1041608 - DNA, 120 bp, Artificial Sequence
  ENSG00000259448_13 (sequence is synthesized)
aggagcacaaaccctactgtgaactgtgcgtatgagggatctaggttgcacattccttaaaagactcttaatgcctgatgatctgaggtggaacaggttcaccctgaaaccatcccccgc

SEQ ID NO: 1041609 - DNA, 81 bp, Artificial Sequence
  ENSG00000259448_14 (sequence is synthesized)
ctggggactgctgacctacaagatatattagttatgactcttggtgcatactcttgacagaaatcccactcaacctagtat

SEQ ID NO: 1041610 - DNA, 120 bp, Artificial Sequence
  ENSG00000259448_15 (sequence is synthesized)
tggtgcatactcttgacagaaatcccactcaacctagtataatgcagaggacagttcacggagcaactcaaataattgccacttttacaatattgaagcttcctacgggaaacataatac

SEQ ID NO: 1041611 - DNA, 120 bp, Artificial Sequence
  ENSG00000259448_16 (sequence is synthesized)
atctctcaatttatgtcctttaatacgattaaacatttttcttcatgtaggttctccagaattttggttatgcctatgcctagattatttatgattgttgttggtattgcaaatgtcctc

SEQ ID NO: 1041612 - DNA, 120 bp, Artificial Sequence
  ENSG00000259448_17 (sequence is synthesized)
tcctattgattatttaatggtatctatggaaagtattgatttttgtgtatttgctctgtgcccacttgccatctaactggttgttatattttattgaacctttcaaaggatatgaattat

SEQ ID NO: 1041613 - DNA, 120 bp, Artificial Sequence
  ENSG00000259448_18 (sequence is synthesized)
gctgattttaatgtcttcttctgattcctgcattattatcctgttttctccagcgttctgtctacttcttctgcaggctgttggtttccttcaaatgtctggggatttttgattgtctga

SEQ ID NO: 1041614 - DNA, 120 bp, Artificial Sequence
  ENSG00000259448_19 (sequence is synthesized)
tcccatttgtaaatgaacgtccagagagtggttttcaaagtgagatccatggacccctaagggttcttaagactctttctgggtgtctgcaaagccaaaactatttaataggaataaaaa

SEQ ID NO: 1041615 - DNA, 120 bp, Artificial Sequence
  ENSG00000232645_0 (sequence is synthesized)
ggggatgctggaacctgcggttgagtgagaaaccggcgccaccgcctgcgtcttggtctcgggctggtggccagcggggtctgggcgtggttttacccagctcctttgcgaagctgctgt

SEQ ID NO: 1041616 - DNA, 120 bp, Artificial Sequence
  ENSG00000232645_1 (sequence is synthesized)
cctttcctcaacgttaccacccggctgggcagcctaccctcgcagcaacaggtgtgcaccttccaagcttgcaacagaccacattcagaagcttgatttcttgttgttctgggaatatct

SEQ ID NO: 1041617 - DNA, 120 bp, Artificial Sequence
  ENSG00000232645_2 (sequence is synthesized)
ggactcctcagcttcacccagtgtccatttcacctcccccggccttccaatgtctcttcttgcagatttctccaagccactctccccgtcatctcctccacccccaggacccaactcctg

SEQ ID NO: 1041618 - DNA, 120 bp, Artificial Sequence
  ENSG00000232645_3 (sequence is synthesized)
cccctcccaccctagcccctgttctccctgcccacctcctaccccactggagtggcctttcatcaaacctaaaccaaagaaaccaacagaccttgctgtcaccactactccgggacctgg

SEQ ID NO: 1041619 - DNA, 120 bp, Artificial Sequence
  ENSG00000232645_4 (sequence is synthesized)
gccactataagaactcgcactgcgtgctgattatactcctcagcacaattcatttcttaaactttttagaataatttaaaatttacaaaaagttgcaaaaataaaaaccagtaaactttt

SEQ ID NO: 1041620 - DNA, 120 bp, Artificial Sequence
  ENSG00000232645_5 (sequence is synthesized)
cgcgcttaccgggagcccgggttgggagagggctccccaggaggggtgtgagctccgaacgagaaagaacgccaccgcctcgtggggtctcttcctaatgtgcagattccaaatctctac

SEQ ID NO: 1041621 - DNA, 120 bp, Artificial Sequence
  ENSG00000258313_0 (sequence is synthesized)
atcaatggagcaagcagggggactgaagcctgagttcagtgcaaactgtgtcctaccacactcaactctggagaatcagactctgctgagatgcctcttcttgtggcaccatccttataa

SEQ ID NO: 1041622 - DNA, 120 bp, Artificial Sequence
  ENSG00000258313_1 (sequence is synthesized)
aatcttcacttaagtatcatttattaaagttgagtccttacgaattgattcctgtgtgatcctcaacgttcctctgacctgttgcaaatgctggctctgactaagggctcctacagcttt

SEQ ID NO: 1041623 - DNA, 120 bp, Artificial Sequence
  ENSG00000258313_2 (sequence is synthesized)
ctgcttctctaaccagagaatttactgtttataacttctcagtgagaaagcccactctgacacaggggtgaaggtatattgatttttgtatacatgtattttaataaaagtaattcatgc

SEQ ID NO: 1041624 - DNA, 120 bp, Artificial Sequence
  ENSG00000258312_0 (sequence is synthesized)
gcaggcactgtcgggatggacatcttcagaaagcatatgcaagttgtcctcagtatgaccaatacaagacgcctgcaagaagattccattccaagctgttaaagtgctgcagtcaataaa

SEQ ID NO: 1041625 - DNA, 120 bp, Artificial Sequence
  ENSG00000258312_1 (sequence is synthesized)
gacctggagtatgagtctacctctgtgcaccacacagctgttgtcatgcaagctatttcaaataccactctggcagacaaagctctaatttgagagaaacaccagatagttccacctaat

SEQ ID NO: 1041626 - DNA, 120 bp, Artificial Sequence
  ENSG00000258312_2 (sequence is synthesized)
catttgctctgctaacaaaggttttgctgttgttcaggaagcactcatattcccccagaatgtgttgagttctttgctgggcacgagggatgcgaagagaaaaagcctgtgaagacacag

SEQ ID NO: 1041627 - DNA, 120 bp, Artificial Sequence
  ENSG00000258312_3 (sequence is synthesized)
aagacagtcatctgcaaaccaaagaaagaggcctcaggagaaaccaaacctgccaacaccttgatcttggactttcagcatccaggactctgagaaaataaatttctgttgtttaagtca

SEQ ID NO: 1041628 - DNA, 120 bp, Artificial Sequence
  ENSG00000258314_0 (sequence is synthesized)
aagtatattgttactgtgctttgggattaaaataagtaactacagtttatagaacttttatactgatacacagacactaaaaagggaaagggtttagatgagaagctctgctgtgcaatc

SEQ ID NO: 1041629 - DNA, 120 bp, Artificial Sequence; identical to SEQ ID NO: 1007713
  ENSG00000258314_1 (sequence is synthesized)

SEQ ID NO: 1041630 - DNA, 120 bp, Artificial Sequence
  ENSG00000258314_2 (sequence is synthesized)
agatgctggcagggctggcctgaggctgcccaagggtgggtgagtgcaccgcctttccaccctagggtccgttattcctagaccagcgcccagattgcggggtcgtgggcgttcgacact

SEQ ID NO: 1041631 - DNA, 120 bp, Artificial Sequence
  ENSG00000258314_3 (sequence is synthesized)
gtgcagccatgaggatctggttgggcggagattcctgccctcctgctgctgagaggccaacctcctaacacgcgctgcagtgacttctggctctacagtctgcgctcctgctggagctgg

SEQ ID NO: 1041632 - DNA, 120 bp, Artificial Sequence
  ENSG00000258314_4 (sequence is synthesized)
gccgctgagcccgcggcggaggatggcagggcttgttccagaaggcttgagggtccccgagtgcaccgccctcccaccaatttctggtttttcctgttggagcccaaggagcaagggcag

SEQ ID NO: 1041633 - DNA, 120 bp, Artificial Sequence
  ENSG00000258314_5 (sequence is synthesized)
aatgaggaacatgatgtttcttaccgacagttactcatgacgtctccatccaggactgaggggggcatccttctccatctaggactgggggcatccttctccatccagtattgggggtca

SEQ ID NO: 1041634 - DNA, 120 bp, Artificial Sequence
  ENSG00000258317_0 (sequence is synthesized)
tttctcctcccctttccagtccagggcctgggaagcttggctgtgtctgtctagtgtcaattttgattcctctctgctgccattctccccctagactggcacctctgctgggaggggccg

SEQ ID NO: 1041635 - DNA, 120 bp, Artificial Sequence
  ENSG00000258317_1 (sequence is synthesized)
ggtaaccggcttcgcctctgcaagactagagagaaggcatccgcctcagcacaggagacgcggccgccgcagaaataagggtctctgccccaacggaacaagcgcagcccacagtccgga

SEQ ID NO: 1041636 - DNA, 120 bp, Artificial Sequence
  ENSG00000258317_2 (sequence is synthesized)
cctccctccgtccagcagccgcctctgccgcgctgcagtctggcggctggaggcttgaagtgagctgctcctcgtcgtccagtagctgcctcgctgctcgaaggctccgttctttctcgt

SEQ ID NO: 1041637 - DNA, 120 bp, Artificial Sequence
  ENSG00000258317_3 (sequence is synthesized)
cgcggacccggcgccagcccaggtagagggcgaggccgaagagcacgaaacccacgctgagtcccactgccccggccaaatacacaggtaagggctctgtacacatcaaatctctagaag

SEQ ID NO: 1041638 - DNA, 120 bp, Artificial Sequence
  ENSG00000258317_4 (sequence is synthesized)
caggcggctagcggggagagaggggaaagtctggggcccactgtcccaaggcagggagctgactctaggcataaggaggaaaagccccagatggaaggggtggaagggggctatgctgca

SEQ ID NO: 1041639 - DNA, 120 bp, Artificial Sequence
  ENSG00000258317_5 (sequence is synthesized)
cagaggaccgagggtggtcgctcacccaggcaggtagctctcgatgactcatatagagagttttcgcagtgagctgctcctcgtcgtccagtagctgcctcgctgctcgaaggctccgtt

SEQ ID NO: 1041640 - DNA, 120 bp, Artificial Sequence
  ENSG00000258317_6 (sequence is synthesized)
atgttcccaaattcccataagaggacacagcccctcagtcagtccttcctctctgctggcttcagtctgcactcctctgcaagcccccactgtgaggcttgaagatggacaagaggaccc

SEQ ID NO: 1041641 - DNA, 120 bp, Artificial Sequence
  ENSG00000258317_7 (sequence is synthesized)
tcataaaagggaggtgacggaacttgcacttggctcctctctgacagtcacccttgagaaagtcacggcagatagggacctcctccttgccatttggtaggtcagccggtgaaaggccaa

SEQ ID NO: 1041642 - DNA, 120 bp, Artificial Sequence
  ENSG00000258317_8 (sequence is synthesized)
ggccagctgctactttctgcctcagccgtgggggaagctctcctgtcttcttatagccatcctcatcctccttggagccatggatgaaacggcaatttgggcggctacactccttgttct

SEQ ID NO: 1041643 - DNA, 120 bp, Artificial Sequence
  ENSG00000258317_9 (sequence is synthesized)
ggaagtcatggcagaagatgaactcgtttttgctcacccccaagttggacacctcgctcatgtctgggtggcgatatcggcaacgcttgcctcgcttgcacacattcctcaagaagtctc

SEQ ID NO: 1041644 - DNA, 120 bp, Artificial Sequence
  ENSG00000233735_0 (sequence is synthesized)
ctatcatgttagaggtctctgatctctgaagatctttgcttaaaggaagtctgccttggcctttgagaaactgctctctttatctctgaagacaaaggaaagggttacctgtttcagcat

SEQ ID NO: 1041645 - DNA, 120 bp, Artificial Sequence
  ENSG00000233735_1 (sequence is synthesized)
ggttgactaactgcagcccaggtataaagttgatcttgctatatttaaaaataaaaaatgttgaaatgctattaattcagttacaaaaaaataagccatgactaatacattgcaaaatca

SEQ ID NO: 1041646 - DNA, 120 bp, Artificial Sequence
  ENSG00000233735_2 (sequence is synthesized)
ctatcatgttagaggtctctgatctctgaagatctttgcttaaaggaagtctgccttggcctttgagaaactgctctctggagtacagcccacctagtgaatatcaaacagtgtttcaaa

SEQ ID NO: 1041647 - DNA, 120 bp, Artificial Sequence
  ENSG00000233735_3 (sequence is synthesized)
agcactggacatctcaaaagggagattcaaggtcaagtgtgggccctcatttcagtgcatcagtggaaagaaaaaaggcgcaaattcattcctccagagactgggatgcaaatgggagtt

SEQ ID NO: 1041648 - DNA, 120 bp, Artificial Sequence
  ENSG00000272010_0 (sequence is synthesized)
acaaacatgaatataaatgctttagtatgaagaagccattgatagttgtaataactttgcattgttaattggtatcttacaaattacaacttatgcaaacaaaattatgttggtctataa

SEQ ID NO: 1041649 - DNA, 120 bp, Artificial Sequence
  ENSG00000272010_1 (sequence is synthesized)
atattggttaaatgaacatgtttcctgtacatttataaattctccatatgaaaaatactcatctgaaatgctaaaagcaaaaatgttatcagtagaaaagcagctattttatgacttttt

SEQ ID NO: 1041650 - DNA, 120 bp, Artificial Sequence
  ENSG00000272010_2 (sequence is synthesized)
ttcacctgtttcaaaggaatgcataagatgcttttataagtgtttttgttcatgtataacatacttagcacttactacagatgaatgctgtagactacttaatttcaaatgcctacattt

SEQ ID NO: 1041651 - DNA, 120 bp, Artificial Sequence
  ENSG00000272010_3 (sequence is synthesized)
tcaaaacaatgaagacatattactgaccataaaatggaaatagcaaccattcaaaatagttgaacatttattgtgtcatttactctacggaggcaatctcattattaaagaagttatagc

SEQ ID NO: 1041652 - DNA, 120 bp, Artificial Sequence
  ENSG00000272010_4 (sequence is synthesized)
cagtttatgtgcatatgtaggtgcaagtatctataatgtacattataatttgtaactatcaaatatgtaagtgtaatgaatatcggtttattttgaatacaagcttatataaaacaaaga

SEQ ID NO: 1041653 - DNA, 120 bp, Artificial Sequence
  ENSG00000286501_0 (sequence is synthesized)
gtgactaacaatctcaatatttcttgttttatggaaaaattttagtttctcaaggatcccatggggattggacatgatggtgtttaagggcctctaacgatccctgccttggatatgtgt

SEQ ID NO: 1041654 - DNA, 120 bp, Artificial Sequence
  ENSG00000286501_1 (sequence is synthesized)
agtcccctcccacactgcatcaggattggtctgtgaatacggcagaaatgatggtatgacttttcctaggctagatcacaaaagaccttgtggctcctctctctctctttctcatacata

SEQ ID NO: 1041655 - DNA, 120 bp, Artificial Sequence
  ENSG00000286501_2 (sequence is synthesized)
catcattccatccaggggaagccagatgctgtgttgtgaggacagtcaggcagccccatggagaggcccatgtggcaaggcattgaggacttctgccaatagccatatgaatgaccatct

SEQ ID NO: 1041656 - DNA, 120 bp, Artificial Sequence
  ENSG00000286501_3 (sequence is synthesized)
tggaagtaggtgctccagccctggataaaccttcagatgactgcagcccctgctcagagcttgactgcaaccccatcagagaccctgagcctgagacactcagctaagtcactcggaggt

SEQ ID NO: 1041657 - DNA, 120 bp, Artificial Sequence
  ENSG00000286501_4 (sequence is synthesized)
tcctaacctacagaaactgtgtgaaataataaatgtttattgttttaagccgccaaggttttggggtaatttgtgatggagtaacagataactaatacaaagaccctttcaaaagtgaga

SEQ ID NO: 1041658 - DNA, 120 bp, Artificial Sequence
  ENSG00000286501_5 (sequence is synthesized)
ttaattgattctctgattctcataccacactggtaatagctgccatgtgaaatattcttactggaagccatgggaagttttaaatctctccagattcctgcacattgcttgcattaatta

SEQ ID NO: 1041659 - DNA, 120 bp, Artificial Sequence
  ENSG00000286501_6 (sequence is synthesized)
atacatatacctgtgtatatccatatatacaaagttaatgcatttttttctaaacattttttgaaatttattttcaattttaaagacaatatatgcttattaaagaaaatgtgaggggaa

SEQ ID NO: 1041660 - DNA, 120 bp, Artificial Sequence
  ENSG00000286501_7 (sequence is synthesized)
cgttaaaaaagattacccatagttctaacacccatagttctaacatctatagttagcacatttgagtgtacttctctatattttctttcagggtgtttaaaaaagtacttgtgatcatat

SEQ ID NO: 1041661 - DNA, 120 bp, Artificial Sequence
  ENSG00000286501_8 (sequence is synthesized)
gctgtataaccatattttcaccaagtcaaatccacttcctttaaaggcagagcccaataatgtgctttgctcatccttgtcattcagctccctgctccgagtgacaggttctcagagaaa

SEQ ID NO: 1041662 - DNA, 120 bp, Artificial Sequence
  ENSG00000286501_9 (sequence is synthesized)
tcagatgcaactatgtccttagcgtgcagatggctcatgagggtgtcatgtgtttggagccaggccctggcagggagtgaccagtgcccggggtgccagacacatggaagatgatttaca

SEQ ID NO: 1041663 - DNA, 120 bp, Artificial Sequence
  ENSG00000286501_10 (sequence is synthesized)
tcaacaggcagttccctctgtgcatattctttttattttcagtactaacatctgtgtgaagggccaacccctgtcccccactaacttatatttatatccacaaatttcttatgggaatca

SEQ ID NO: 1041664 - DNA, 120 bp, Artificial Sequence
  ENSG00000286501_11 (sequence is synthesized)
acactcccttattctctgctcttcatagagggctgcaatgctggcaaagtgtaggcatcaggaccctctccaaggccctgagaggggttctacaaaatgttcagatggttatacgttttt

SEQ ID NO: 1041665 - DNA, 120 bp, Artificial Sequence
  ENSG00000286501_12 (sequence is synthesized)
catccccgaacccaacacacatatactttcctttatgcagggtggtgctgagtggtcatgtgagagcattttattgttatgattttttttttttaacagagcctgaaaaattgtgtaagt

SEQ ID NO: 1041666 - DNA, 120 bp, Artificial Sequence
  ENSG00000286501_13 (sequence is synthesized)
gcctgaaaaattgtgtaagttccaggacttaaaaacctggatatacctctttgtctctgaattgcaaatatatacataatatatttttaatataaatatatatctgtggtatttatatat

SEQ ID NO: 1041667 - DNA, 120 bp, Artificial Sequence
  ENSG00000286501_14 (sequence is synthesized)
attgctttgtactgtgaacataatttattatttgctagccttatttgttaagtcagaggaaatttcagagccatgagggttacagaatgagaggatttctaatgagctcaatgtgttcta

SEQ ID NO: 1041668 - DNA, 120 bp, Artificial Sequence
  ENSG00000286501_15 (sequence is synthesized)
aatggttttatgtgattcccaggtttgcttcatcagaatccataggttctcaagtggcgctcctccttgtgctcgcagaaccccgcttattgactctacagatactttttgcagaaaatg

SEQ ID NO: 1041669 - DNA, 120 bp, Artificial Sequence
  ENSG00000286501_16 (sequence is synthesized)
gctgcctctttgctgtctactgtgactcttcaactaggaaagaaccaaatagatttaacctactcaactcgacacttctgaacaaaaaagaatgcagaatatatagcaccaaccaggtgg

SEQ ID NO: 1041670 - DNA, 120 bp, Artificial Sequence
  ENSG00000286501_17 (sequence is synthesized)
cagacctgatctcaatcccagctttctccctgtccactcctgcttcctcctccctttatccttcacaggctaagcattaaacatcaagtaagtaaacatcaggtcccatctaagcatcgg

SEQ ID NO: 1041671 - DNA, 120 bp, Artificial Sequence
  ENSG00000286501_18 (sequence is synthesized)
cttctatgagcatctgaacggacatacgtactcactgttaaaaatgagcaaatccagaagggcatatacgaagaagccacagttcctccccttattctctcctgccctgcatttcctcac

SEQ ID NO: 1041672 - DNA, 120 bp, Artificial Sequence
  ENSG00000286501_19 (sequence is synthesized)
atgaggaaacactttaaacagtttctcttatagctctttgacagttagttccatactcctaaaataagtttatgccatgcttattatttatttgatatatattttagatatttgttatat

SEQ ID NO: 1041673 - DNA, 120 bp, Artificial Sequence
  ENSG00000286501_20 (sequence is synthesized)
acacataaatatatgtaatatatttgttatctttttccataatatgtttatgccatgtctttcttttcttttttaaccattgaagtataatggacacaaaataaactgtttatttttaat

SEQ ID NO: 1041674 - DNA, 120 bp, Artificial Sequence
  ENSG00000286501_21 (sequence is synthesized)
gtgagcagtctgatgaattttgacatttatatatgccacaatcaagctattaaaaagggcaaggggaaacttttcaggggtgagcatattcatcatccctgaaagtttcctcatgctcct

SEQ ID NO: 1041675 - DNA, 120 bp, Artificial Sequence
  ENSG00000286501_22 (sequence is synthesized)
tttaatacccccaccacctctctccatactctctgatctgttttctgtcactataagttagttttcatttttcaattttaaataaatggaatcttatagtatgtggtattgtttttctgg

SEQ ID NO: 1041676 - DNA, 120 bp, Artificial Sequence
  ENSG00000286501_23 (sequence is synthesized)
cttctttcgctcagcataattaatctgagattcaaccatgtagttgcatgtacctaattcattcttttttgttactaatatatctcattgtatagatacagcatgatttgtttattcatt

SEQ ID NO: 1041677 - DNA, 120 bp, Artificial Sequence
  ENSG00000260042_0 (sequence is synthesized)
aggggaggaaaggtcttgagggagcagcacgcttgcctgatgggtgcccaaagccaggggcaggtggaggtgagagaaggacaagctctgcaaacgttgcggaagcgctctgtccatgga

SEQ ID NO: 1041678 - DNA, 120 bp, Artificial Sequence
  ENSG00000260042_1 (sequence is synthesized)
gaaggcacaggacttccatgtggggagcagcttactcctgctgagaactttggggagacagagtggagcagccatctcagacctgagcggctaaggagctgggtccccctctgtcgcact

SEQ ID NO: 1041679 - DNA, 120 bp, Artificial Sequence
  ENSG00000260042_2 (sequence is synthesized)
gtgcagagctgctggactttgcagtaagcagccttcaggtctaaaggctccacattgtaaggaagcccagtcacatggacagaccatatgggtccagttggctgccccagccaaggtttc

SEQ ID NO: 1041680 - DNA, 120 bp, Artificial Sequence
  ENSG00000260042_3 (sequence is synthesized)
agccaacagccaagattacccacagccacgtgtatgaatgagccttcaaatgagtccagcacccagcagaataatgccccctcccgtctcacaaagatttccatgccctaattcctggaa

SEQ ID NO: 1041681 - DNA, 120 bp, Artificial Sequence
  ENSG00000260042_4 (sequence is synthesized)
atggcaagcagagctggcagatggaatttagggtgtggagcttgaggtggggagggcagcctggattacacaggtgggccctatctaagcacatgagcccttatacaagcaaagaacatt

SEQ ID NO: 1041682 - DNA, 120 bp, Artificial Sequence
  ENSG00000260042_5 (sequence is synthesized)
tcctcagctgccagacagctggcaaacagaattggaggggcagagagatgtaatcagaaagggcagaagagacttaaaaggaagagaggctcgacctgctgtggctacctttgaaaatgg

SEQ ID NO: 1041683 - DNA, 120 bp, Artificial Sequence
  ENSG00000260042_6 (sequence is synthesized)
aggaatggggctccaagccaagggatgcaggctgcctcttcattggagtactgccagcaagaaaacagcccagcaattgcaaggaaattaattttcccaacagtctgaatgagcaagaaa

SEQ ID NO: 1041684 - DNA, 120 bp, Artificial Sequence
  ENSG00000260042_7 (sequence is synthesized)
atggactctcccctgccacgccctgagttcagccttgtgagactctaagcagatacccactcaagcccacaggacgtccaacccataacaattgtaagataataaactgggatagtttta

SEQ ID NO: 1041685 - DNA, 120 bp, Artificial Sequence
  ENSG00000260041_0 (sequence is synthesized)
aatattaaccttcactttccacaggcatttttttctgcaaatggcaccagcttttggacttaaaattttattccaaatactatttagatgcatcagggccctcaaaatatggatttcaag

SEQ ID NO: 1041686 - DNA, 120 bp, Artificial Sequence
  ENSG00000260041_1 (sequence is synthesized)
aaaaaaaaaggaagaaagaaaaaaaaagtgctgcttgaagaggaactgaactcacaatctgggagctagaaatgctctctcgtgctctctctgtctccagtgataagctgaccagatgcc

SEQ ID NO: 1041687 - DNA, 120 bp, Artificial Sequence
  ENSG00000260041_2 (sequence is synthesized)
cagatgccttgaattaagtacagggtcaccaacatctctaatagaatccaactgtggaatagaaaaactatttcgtctaagaagtggatcctagctgtcaaataaaaaatcgctgttgaa

SEQ ID NO: 1041688 - DNA, 120 bp, Artificial Sequence
  ENSG00000260041_3 (sequence is synthesized)
cttttttctaatggaggaaggtggaagggagagttcatgcaacttcccagtgagatccaccatcgtttctcctgcctatgcccacagggcacttggtttatcctgcaactgctgcaagtg

SEQ ID NO: 1041689 - DNA, 120 bp, Artificial Sequence
  ENSG00000260041_4 (sequence is synthesized)
ttacacccatgtacaatttagagcttaggaactcatggaaaaaaatagagttaacacggataaagggattttaaaaggcgagagagggaagagtttcttaaggagtctccaatgacaaaa

SEQ ID NO: 1041690 - DNA, 120 bp, Artificial Sequence
  ENSG00000260041_5 (sequence is synthesized)
atgtgttcattttctgagacctccagaatgaattactaaggtatcctcaaacaaaagtggttttgctattcagaaattcatatgttctaaatagagaaaattaaaaattaaaaagacatg

SEQ ID NO: 1041691 - DNA, 120 bp, Artificial Sequence
  ENSG00000260046_0 (sequence is synthesized)
atgaactatatcttaagaattcataaagccctaaaaagtaaatatttacaaccagaaatctttctgacaaagaaacaagattactcaaagtaagtagtagtttgggctccctggaaagaa

SEQ ID NO: 1041692 - DNA, 120 bp, Artificial Sequence
  ENSG00000260046_1 (sequence is synthesized)
cccagaacttaagtgtcaggaaatgtggatagttctgaatgtgcccctggctggttgatgactctgggcaacttatgcagtacctctaactcatggtttatttacctgaaaaataagtgg

SEQ ID NO: 1041693 - DNA, 120 bp, Artificial Sequence
  ENSG00000260046_2 (sequence is synthesized)
gttggctatgtctgtggtttgaaaggtgctctatgatgtcccagatgtcttagcagtgtatcattggctgttttggaggctgtcaggggtccagatggctgctcccactgagcctgcttt

SEQ ID NO: 1041694 - DNA, 120 bp, Artificial Sequence
  ENSG00000260046_3 (sequence is synthesized)
taacagagcttttcagtttgtatttcttgtatacacaaagtaatattaaataaaaaaaatataatccagctaagaaagtttgagaatactggcttgagattcaaaataaaataaaccaaa

SEQ ID NO: 1041695 - DNA, 120 bp, Artificial Sequence
  ENSG00000260046_4 (sequence is synthesized)
aattttagaaattatattagtctagaaagatagtattgtgtctctttgtctttttagtacctagcacatatcaggtacttgatacatatttatcatatgaatgcaatggttgtaatgaac

SEQ ID NO: 1041696 - DNA, 120 bp, Artificial Sequence
  ENSG00000260046_5 (sequence is synthesized)
aactgggaaggaaatgcaaaagcagaaggcaccatatttgtgttgctattcctgggtgtcatttctatgtaacttgtgataaccagtagtaaagaacaacatggactatgtttaatagac

SEQ ID NO: 1041697 - DNA, 120 bp, Artificial Sequence
  ENSG00000260046_6 (sequence is synthesized)
tataaattccaggaaatctagagagaaaaaatgggcaatttagaacagactagaagagtaactctttcagtttgtctggaaaaccgaatctaaggaataaggtcagtttgcagtttcttt

SEQ ID NO: 1041698 - DNA, 120 bp, Artificial Sequence
  ENSG00000260046_7 (sequence is synthesized)
caagtagaattggtgactcttggatgcagtttataaacacgtaacacattttccttgcatggaaatatatctattctatgacctcttctacatgaagaaaagatttgaaattttcttctc

SEQ ID NO: 1041699 - DNA, 120 bp, Artificial Sequence
  ENSG00000260046_8 (sequence is synthesized)
cattaaataatgttttgtgtgcatgttgcaaaaataagagagaagcaagaataactctagcagatgcttaaaggtttaagattaaagacacatgtaaatgtgattcatagtgggtgttct

SEQ ID NO: 1041700 - DNA, 120 bp, Artificial Sequence
  ENSG00000260046_9 (sequence is synthesized)
gtgcacttgagtgaatattcccaaatcacagctagaaaaatttaggagtaaattgacttaacttatggtaaatcaataggggtccctgaattggagggaaacagatgagcaagaaaaaaa

SEQ ID NO: 1041701 - DNA, 120 bp, Artificial Sequence
  ENSG00000260046_10 (sequence is synthesized)
ttatttgacaggactccactaaggaaaacaacattcaagtaacagatgaggtattctactgcccagaggaattacccagcctttagcaaggcgaagtcagcctcaactggcaggaggttt

SEQ ID NO: 1041702 - DNA, 120 bp, Artificial Sequence
  ENSG00000260046_11 (sequence is synthesized)
gttttaaaactgaaatgagaaaaaggatctgggcttacaaatgatgggaagatatattatcaacagggaaaaaaacccccagaaaatagcaactaacttgtttccccagcacaactgaaa

SEQ ID NO: 1041703 - DNA, 120 bp, Artificial Sequence
  ENSG00000260046_12 (sequence is synthesized)
ggatgaagaaggaaaacaatttaatgtaccctggtcatgcagttactttcctttatccttactaacagtgcttgtcaagatggttctggaaactgaataaatgtaagtaatgaatcatga

SEQ ID NO: 1041704 - DNA, 120 bp, Artificial Sequence
  ENSG00000236194_0 (sequence is synthesized)
acatttttattttaaacttatacagacaaacatcagatgccatgtggtttgtctctgaccctttgcgctacttcatgacagctttactgagtgaagcctgaatacccaatcgggaaggca

SEQ ID NO: 1041705 - DNA, 120 bp, Artificial Sequence
  ENSG00000236194_1 (sequence is synthesized)
agatgttcttgtcttttcccaactctcttcaaagtttaacagccttggaaggagtcttagaacagcaacaaaagcacaatttacagaaaaatggaggtgctgctatctgtttcctcgcag

SEQ ID NO: 1041706 - DNA, 120 bp, Artificial Sequence
  ENSG00000236194_2 (sequence is synthesized)
gtttattcttaataactatgtccattttcacatggatgacaccactgagatgatgaatacctgtattgattgattgatgaagaacatttatctttttctacctacttttggaagctagct

SEQ ID NO: 1041707 - DNA, 120 bp, Artificial Sequence
  ENSG00000236194_3 (sequence is synthesized)
tgcaaaatctactgcaacattcactcttcatgtatccttctattacctttggtaccctgaataaccttttaaaaatttttgtacttttctaatatgaagagaagtagcttcatattctat

SEQ ID NO: 1041708 - DNA, 120 bp, Artificial Sequence
  ENSG00000236194_4 (sequence is synthesized)
gctagttttctgaggtgcttgtgctgactcattttttaaattatactaagatatagagcatggtttgagagcagtaatgagattctcagaaaatatgaaaactttcctttctgactagtt

SEQ ID NO: 1041709 - DNA, 120 bp, Artificial Sequence
  ENSG00000236194_5 (sequence is synthesized)
agagaaaggttggggaagacaaggggaaatacatcaatgagccaatcaattattgttatttgttgggattaatttggtgactaatatttttaatgcccatcaggctactaaatgtgaatt

SEQ ID NO: 1041710 - DNA, 120 bp, Artificial Sequence
  ENSG00000236194_6 (sequence is synthesized)
ttttcccctggtaggggatttctttgcatatgggaaatcaggccgaagttgccagtaacagccacatccatgatttgtattaaaaataactattcatcattctgggctagagctctgctt

SEQ ID NO: 1041711 - DNA, 120 bp, Artificial Sequence
  ENSG00000236194_7 (sequence is synthesized)
accatggctcacctgggaagatattctgattatgtatctaatcattatgatgccacctttcgagaggtgagcagacaattaacaagtccttcaaattatgttcaaaacccagagtttgag

SEQ ID NO: 1041712 - DNA, 120 bp, Artificial Sequence
  ENSG00000236194_8 (sequence is synthesized)
aaaatgttccaacgccttcaagtgtgaagataataaaaacattacctaatgcttaccgttcactgacagtgtgctgggcagacattgttttcagctctggccttgtgttaactcgtgatt

SEQ ID NO: 1041713 - DNA, 120 bp, Artificial Sequence
  ENSG00000236194_9 (sequence is synthesized)
ctcagaggagtgggtattattcccagatggaagatgaagaaatggccacagagaagttaagtaatttgtccaaggtcacattactgttcttggcggggctgattccagagactgcatccc

SEQ ID NO: 1041714 - DNA, 120 bp, Artificial Sequence
  ENSG00000236194_10 (sequence is synthesized)
taactagtgtacagcaaaagcgagctggccactgccactttgttataagacattttgtttctttgaggcttgtatttctttgtgttcccaaatggagtctcgttggtttttgaatagaaa

SEQ ID NO: 1041715 - DNA, 120 bp, Artificial Sequence
  ENSG00000236194_11 (sequence is synthesized)
cgttggtttttgaatagaaaatatttttatatgtttaggatttttttaaatgttgatgaagatggtgataaatatttttccaattaaagtatatacttctggtggaaattatattaaaga

SEQ ID NO: 1041716 - DNA, 120 bp, Artificial Sequence
  ENSG00000273486_0 (sequence is synthesized)
agaagcaggaataaaatgatcttttctatttccatgattttttatgtttctgtttaaatggttaaatacccaattaggttagatgctaattaaatgtaaaattactgggctgttccaata

SEQ ID NO: 1041717 - DNA, 120 bp, Artificial Sequence
  ENSG00000273486_1 (sequence is synthesized)
tgcatgttaaagttgtacttcttggttgtttgtaatttacctaactcttgagagatcatcagagcagcccagctgagtttaaagaaggcttccaactgcccaggatatgcatcagttcct

SEQ ID NO: 1041718 - DNA, 120 bp, Artificial Sequence
  ENSG00000273486_2 (sequence is synthesized)
gaacaaaaaaagaacaccccaggatcaacagaagctactatcaaatccttcaaacactacatgcaccacatgctcacatttgtcctatttttgctactatttatccacaaaaaagccaag

SEQ ID NO: 1041719 - DNA, 120 bp, Artificial Sequence
  ENSG00000273486_3 (sequence is synthesized)
cctgaactccttcttgaggccaaaacttaaaaatataccaaatgaatcagttcaaaattttacaaatttggtttggcttaatcataactgattcttcatactattgacaccgttgattct

SEQ ID NO: 1041720 - DNA, 120 bp, Artificial Sequence
  ENSG00000273486_4 (sequence is synthesized)
tcacactatagataccactcactaaaattacaactcagtcacctcttcccatataccatatttcattaaaatcaatgtaagataagaaatggttaccagatgccatcgtttcagaccaaa

SEQ ID NO: 1041721 - DNA, 120 bp, Artificial Sequence
  ENSG00000273486_5 (sequence is synthesized)
ccatatgtcaaattttgaataaacctaacaacatctgattggttaagtagcatacctagatttattaaaatcactacactcctttaatgtctgtaggagaacatgcatgcacaagcacac

SEQ ID NO: 1041722 - DNA, 120 bp, Artificial Sequence
  ENSG00000273486_6 (sequence is synthesized)
tatatatatatatatatatgtatatgctactgcaaaattgaagagactttaccaagttctgtcattgacagggacattatatataaagaatatacatactgtaattcacctcatcaagag

SEQ ID NO: 1041723 - DNA, 79 bp, Artificial Sequence
  ENSG00000273486_7 (sequence is synthesized)
cgggaggcagatcactttgagctcaggagatttgagaccagcctgggcaacgtggcaaaaacccatctctacagaaaaa

SEQ ID NO: 1041724 - DNA, 120 bp, Artificial Sequence
  ENSG00000273486_8 (sequence is synthesized)
agcctgggcaacgtggcaaaaacccatctctacagaaaaatacaaaaatgagctgggcgtggtgactcccgcctgtagtcccagctgtatacatgggaggctgaggctggaggattgctt

SEQ ID NO: 1041725 - DNA, 120 bp, Artificial Sequence
  ENSG00000273486_9 (sequence is synthesized)
agaggttgcagtgagccaagattgtaccagtgcactccgccctgggtgacagagcaagaccttgtttcaaaaaaaaaaaaaagagttaattgtaccaggaacatgtggtgtcaaaattta

SEQ ID NO: 1041726 - DNA, 120 bp, Artificial Sequence
  ENSG00000273486_10 (sequence is synthesized)
tgtcaaaatttaaaatatgtgaactctttgacccagcaatgctattttcagggatatatcctaagatcatcaccagcaaagtatataaggatgtgcatgcaaaaatattcatcatggctt

SEQ ID NO: 1041727 - DNA, 120 bp, Artificial Sequence
  ENSG00000273486_11 (sequence is synthesized)
tctttatacaatgaaaaattggaaataaacttctcattaatgggatgctggttaaagaaaatcattactgtaatatgcagccatctaaaagggtaatttatatgtatatatatttacata

SEQ ID NO: 1041728 - DNA, 120 bp, Artificial Sequence
  ENSG00000273486_12 (sequence is synthesized)
agaaaaccctcatgtcatattgctgagtaaaaagaaagatgtcaatgagtattcatgatgtgattctatttatccttgcaaatggtggaaattcaattatatggtattttctctcttttc

SEQ ID NO: 1041729 - DNA, 120 bp, Artificial Sequence
  ENSG00000273486_13 (sequence is synthesized)
tgtttgtttttcatatatgtatatatttcctttgaaatcagaaaaaaatcaagctattttcatcagaggaaaaaaatcattactctgtatttcagtcacactaaaatagtcacccaagaa

SEQ ID NO: 1041730 - DNA, 120 bp, Artificial Sequence
  ENSG00000232642_0 (sequence is synthesized)
aggagccagggcacgcgggccttcaaccgccgaggcccccgccgcccttctggacttttatcgaggcatgtacactaatacgaaagagaatttgccatttacctgtaagattgagggtga

SEQ ID NO: 1041731 - DNA, 120 bp, Artificial Sequence
  ENSG00000232642_1 (sequence is synthesized)
caacgtaagaggaatggttttaagtgacgcgtccggctccttactcccactgaagggtgaaggtgccacaggtggacctggtttggattctgatgtgaagaaaccgacttcaaaacattt

SEQ ID NO: 1041732 - DNA, 120 bp, Artificial Sequence
  ENSG00000232642_2 (sequence is synthesized)
gggccaatcaggaaaatgcgaaaactctgactacaaatttaatgatatctagaattattgttaatagtttaaggtgatagaggctatgttcctaagtgaagaatgaagtagtggcagttc

SEQ ID NO: 1041733 - DNA, 120 bp, Artificial Sequence
  ENSG00000232642_3 (sequence is synthesized)
catgagaaaaaccactagcttcaaacccctgccaagcccagagaatgccttacactgaaatagatcatcataaaattaatagcccctcaaacactgcctggctcagagttggcgcttgtt

SEQ ID NO: 1041734 - DNA, 120 bp, Artificial Sequence
  ENSG00000232642_4 (sequence is synthesized)
aaaattttgaggaagcaagcaagcaagcacatgggaggataccaaaacatggcagtaaaaggagctaaacacacaaaagaaaagacagagttctgctcttgttgcccaagctggagtgca

SEQ ID NO: 1041735 - DNA, 120 bp, Artificial Sequence
  ENSG00000232642_5 (sequence is synthesized)
gacgccgaagtcccgggaaaaggaagggcgccatttgatttcacagcaaacgggcggtgacaccgacttcccgggaaagggaaaggcgccatttgatttcacagaaaacggaaacgcagt

SEQ ID NO: 1041736 - DNA, 120 bp, Artificial Sequence
  ENSG00000273487_0 (sequence is synthesized)
tcaaagtggtgggataacaaaagttttttttttgctttttaaaaaattcaatgttagcaagagaatgataagtttgggagcttcatatgatgctttagaagtgtaaatttcctttctgat

SEQ ID NO: 1041737 - DNA, 120 bp, Artificial Sequence
  ENSG00000273487_1 (sequence is synthesized)
aaatttcctttctgataagcagctaagcaagctatatcaggaatgtagctttttggttgttttttgagatggtcttgcgttgttgcccaggctttgagtgcagtggcatgatcatggctc

SEQ ID NO: 1041738 - DNA, 120 bp, Artificial Sequence
  ENSG00000273487_2 (sequence is synthesized)
cctcccacctcagcctcccaggtagctgcgactacaggcacgcaccactccactcggctaattttttattttttatttttgtagagacagggtcttcctatgttgcccaggccagtctct

SEQ ID NO: 1041739 - DNA, 120 bp, Artificial Sequence
  ENSG00000273487_3 (sequence is synthesized)
gggctcaagtgatccttctgccttggctcacacctataatcccagcctcccaagtagctgggactacaaggcacctactgctgcacttagctttatcttttaactcatattttaaatgtc

SEQ ID NO: 1041740 - DNA, 120 bp, Artificial Sequence
  ENSG00000273487_4 (sequence is synthesized)
cttttaactcatattttaaatgtcttctacaaggcacagaaaaataagtagttgtgttcatttttaagtaaatagtagtaaacagtttcaaatgctgtttgagatgttaattaaggcaca

SEQ ID NO: 1041741 - DNA, 120 bp, Artificial Sequence
  ENSG00000273487_5 (sequence is synthesized)
ctagactagtgggttgaagggtgaataggaaataagtaatacttattctttcaaggagcttgactgaaaaggagacagtggtagtttgaagatattgctgtttttaagataaaaatgatt

SEQ ID NO: 1041742 - DNA, 120 bp, Artificial Sequence
  ENSG00000273487_6 (sequence is synthesized)
tcagcactttaaaaataaaaagttggaaatgatcaatgaatcaaggatcatcaagaaagaggcaagaggaagtaagattaagcacaaagagtatcaactgataggtggcatttcaaggaa

SEQ ID NO: 1041743 - DNA, 120 bp, Artificial Sequence
  ENSG00000273487_7 (sequence is synthesized)
cttcaggtgttgaatatctaaagcaccaaatgcgtgtggacagcagtgaagataaagctggaaatgcgccggcagaccaacacatgatgagccctgtaggtggtggacaaagactatgag

SEQ ID NO: 1041744 - DNA, 120 bp, Artificial Sequence
  ENSG00000273487_8 (sequence is synthesized)
caagccatttaggcaaacatctgaagaatttaaaaatcaaaggcaaacaaataggactgtttcattaagatcacttgcattctaacaggttatgatgaatggaaagctgatggttcctgg

SEQ ID NO: 1041745 - DNA, 120 bp, Artificial Sequence
  ENSG00000273487_9 (sequence is synthesized)
ttggaaaaaagataattttcaatttggacatgtcacatttgagatgcagttgacacacccaagatacataatatattgtctttcaaaattcagaaacctaataaaccatgatcttaataa

SEQ ID NO: 1041746 - DNA, 120 bp, Artificial Sequence
  ENSG00000273485_0 (sequence is synthesized)
ggccccagggaagtgacagttgccactgttcactgagttcctccagggtgcatggcacccctcatttcccatcctcacagtcccacgttgagctgtgtgcccgccgtgcactagggaaag

SEQ ID NO: 1041747 - DNA, 120 bp, Artificial Sequence
  ENSG00000273485_1 (sequence is synthesized)
tgaaggcttcctgaggacgagtggctcgccagggtcacagatgagaggcagactgagattcaagcttgggtgacctgcctcaaatgcttaggttctttttgccaccacgagcttctcctg

SEQ ID NO: 1041748 - DNA, 120 bp, Artificial Sequence
  ENSG00000273485_2 (sequence is synthesized)
ccctctgggagtccaggtggcgcatattagcagaggggccagggactccttggatccagggcgtgtccttagggtctcagccttgagggtgtaaaagctaaagtgagtgtccgggtggat

SEQ ID NO: 1041749 - DNA, 120 bp, Artificial Sequence
  ENSG00000273485_3 (sequence is synthesized)
aagggacttggataggatcctgccgtgtgggctggggtgggtacagcaagatgccagaatccctggagttcgcaaggacattatctttttggagacctcagggtctgatcacacttcatg

SEQ ID NO: 1041750 - DNA, 120 bp, Artificial Sequence
  ENSG00000273485_4 (sequence is synthesized)
actgttctctgggcctcagattcctcatcagtgaaaagaggataaatcatcctgagccttgctctttcctagggatgttggagggaaagaaaagaataaaagatgcctgattgtgctctg

SEQ ID NO: 1041751 - DNA, 120 bp, Artificial Sequence
  ENSG00000238107_0 (sequence is synthesized)
cacgatccacatctcaggggggtgaggcaccccccgcaataaggggagtaatagcaacgatctctccacccctagctattacgatccacggtggactcatagcctgtttacgatattgtc

SEQ ID NO: 1041752 - DNA, 120 bp, Artificial Sequence
  ENSG00000238107_1 (sequence is synthesized)
ttttcttccgttctgtcctccaaatcggcctcttccgagtgtgttgaccagggccagccaggcagaaggctggtttcgctcaaagaggatcctctcgcccatcctggaacttcaggcctg

SEQ ID NO: 1041753 - DNA, 120 bp, Artificial Sequence
  ENSG00000238107_2 (sequence is synthesized)
tttcggttggacctgcagagaagccttaggggccacttcgttcggcatcccagggggcaggtgcgcggtacagggaagaagagggtttgactgttgttctcaacccccggcaccaaacct

SEQ ID NO: 1041754 - DNA, 120 bp, Artificial Sequence
  ENSG00000238107_3 (sequence is synthesized)
ccaccctggtgcgcgcccctccaggctcctgctggtctcagtcgccggtagttaggtctcctgtcagcctgagctcccgagacacccagccccggaaggacacgtaggggaaaccagcta

SEQ ID NO: 1041755 - DNA, 120 bp, Artificial Sequence
  ENSG00000238107_4 (sequence is synthesized)
ctcacttcggtcttgtccgcaagggatccctttctgacgggaaagaaaggcggcgagtccggtcctgttgagtaagcggaagagagatcaaggggaagagaagaaaaatcctgtgaggtt

SEQ ID NO: 1041756 - DNA, 120 bp, Artificial Sequence
  ENSG00000238107_5 (sequence is synthesized)
tcaagatctaaagttaccatgaagtcgacctaacctcgtctggaggtcctcctgtggctggcgaaggtgagtcgagtccccgtcttcagtttgtcaaagtggacaaagcctacgacaatg

SEQ ID NO: 1041757 - DNA, 120 bp, Artificial Sequence
  ENSG00000238107_6 (sequence is synthesized)
gccagtaccagctactaggcattcccagtctttccagttggtggtactggagcttccctacccaggatttccgtggattccaagggtacaactgaacagcttttgttgttccaactgctc

SEQ ID NO: 1041758 - DNA, 120 bp, Artificial Sequence
  ENSG00000238107_7 (sequence is synthesized)
agaaatgttcaatgaaaattaatccccacgacgggcctgttgtactttcaatgtacaattggcagaacctaagggaactctaggaggttccgggatgaatatgggaagtatgacacagtc

SEQ ID NO: 1041759 - DNA, 120 bp, Artificial Sequence
  ENSG00000238107_8 (sequence is synthesized)
atttttatttacacatgcattccaaaaacacattgaataaacacatccagttcacctgtgccacacttacaaagatgggaaaagaggaactacatacaaacaagtgaagatgtaattgaa

SEQ ID NO: 1041760 - DNA, 120 bp, Artificial Sequence
  ENSG00000238107_9 (sequence is synthesized)
tggcttttaaatatctgctgaaggtttccactgaaggtcttctaccagtgtcttctctttctctaaaataagacattcaagtgccagaccctgaaataagttttctggttccagcttgtt

SEQ ID NO: 1041761 - DNA, 120 bp, Artificial Sequence
  ENSG00000238107_10 (sequence is synthesized)
ctttcccattctgtatctttgcccctccactctcttcttacatatgcaggaaaggtcagctctccctcagtttctaatttgcaacatcccacatgaagaatgcaatgaccagcatcaaaa

SEQ ID NO: 1041762 - DNA, 120 bp, Artificial Sequence
  ENSG00000238107_11 (sequence is synthesized)
attagacaccctccatgggactccatctctgtcttagttggagctaatgtaccataaactgggtagctgatccacaacagacatttctcacagttctggagtttggaagtctaaggtcaa

SEQ ID NO: 1041763 - DNA, 120 bp, Artificial Sequence
  ENSG00000238107_12 (sequence is synthesized)
ggtgccagcatggtagggttatggtgaggaacctcttcctggtcatagactgccatcttcctactgtatctgcagggggctgaaagaggctgagagagctctctagtgtcccttttatag

SEQ ID NO: 1041764 - DNA, 120 bp, Artificial Sequence
  ENSG00000238107_13 (sequence is synthesized)
gggcactaatcccactcaggaggactccaccctctggatctaattacctcccaaaggcccctcctcctaattttaacactttccaggggtggacaggggaaggttagggtttcaaccaag

SEQ ID NO: 1041765 - DNA, 120 bp, Artificial Sequence
  ENSG00000238107_14 (sequence is synthesized)
gcattttggggggacacaaatattaggtctcctgtgatctttcaagaagaagaagaaattataaatgacccaaagctttgtacatttcacagttagaaataaagaaaacttttcctaaga

SEQ ID NO: 1041766 - DNA, 120 bp, Artificial Sequence
  ENSG00000234973_0 (sequence is synthesized)
aaggttctgacagagtaggaagtgggctgtggggtcacgttgttcccacttcaccacagtgaaagcctgccaggaaacacatcccggaaatgagatctactctagaaaatacaaggaagg

SEQ ID NO: 1041767 - DNA, 120 bp, Artificial Sequence
  ENSG00000234973_1 (sequence is synthesized)
tatggacgtgggagctgatcactgcatatgtgtagacacaaagggaacaaggactgccgcgcctacctgagggcagaagatggagcatgaggattaaaaactacccatggggtattgtgc

SEQ ID NO: 1041768 - DNA, 120 bp, Artificial Sequence
  ENSG00000234973_2 (sequence is synthesized)
ttattccttattagagacaaagtaatctgtacgtcaaacccccacaacacgcaatttacccgtgtaaaaaacctgcacttgtaccccttgagccgaaaataaaagttgtaaagaaaaaaa

SEQ ID NO: 1041769 - DNA, 120 bp, Artificial Sequence
  ENSG00000234977_0 (sequence is synthesized)
ctactctgcctgttgcaaggccctcccggcccaggcttgggagagaggtgtgccctacactgccgtgagccctgagtggacccagacggccagagggagcagccctcagcccagactcca

SEQ ID NO: 1041770 - DNA, 120 bp, Artificial Sequence
  ENSG00000234977_1 (sequence is synthesized)
aagtgtctcgtcgaaggtcacgaaggcaggaaatagcagatgccaggagggtcatggcactcagagatgaaaggagtccctcatgcccggcactcccccgcccaccagccatcgtggcca

SEQ ID NO: 1041771 - DNA, 120 bp, Artificial Sequence
  ENSG00000234977_2 (sequence is synthesized)
tcctgggcacgtgagcaccactgcgccagcccagcctggagcctggtactgctggccttggcaggcagacattgctggtcaggaatgcagaatcggcctttaaatacctcagcaatttca

SEQ ID NO: 1041772 - DNA, 120 bp, Artificial Sequence
  ENSG00000234979_0 (sequence is synthesized)
gccagttcccctcccctgcccgcctaaggaggctggaggtttgaggcactgaggatgccccgtgcgggcttaggcagagctgtgcgccggctccagaaggtcacctcgcccgcagctcag

SEQ ID NO: 1041773 - DNA, 120 bp, Artificial Sequence
  ENSG00000234979_1 (sequence is synthesized)
ccctggatggctgcccttcctggaaaccttaggatacctctgctggctccagctgccccctccctgtgagtcagctccttcaagccacagcccgccagatggcttccaaggcaccaagga

SEQ ID NO: 1041774 - DNA, 120 bp, Artificial Sequence
  ENSG00000234979_2 (sequence is synthesized)
tgctactgccgtcacctctgcaccttgtccccagctgggctgctgactcagatatgccaggctcctatgctatcatttcaactcccaggctcagctcactccaggagcctagttggagaa

SEQ ID NO: 1041775 - DNA, 120 bp, Artificial Sequence
  ENSG00000234979_3 (sequence is synthesized)
tggatttccccagctgaaggacgcttcagctataccagtggagaaacggaggcacagagtccgtgaatggtctaaggacacatgcacccaaaattgaggcccaggcagggctcgcctctt

SEQ ID NO: 1041776 - DNA, 120 bp, Artificial Sequence
  ENSG00000236226_0 (sequence is synthesized)
atatacaaacatatggtcacatctatttggtgtatagggaaaagcaagtttaagagagcatctccaagggactaatatgcaagaggactccagcccagtaatgccccattccccacttag

SEQ ID NO: 1041777 - DNA, 120 bp, Artificial Sequence
  ENSG00000236226_1 (sequence is synthesized)
cacttcctccatttatgtttccaccatccacactccagccaatggcttcccacccttcacagtcgctgcatattgtttaactgcttctgactgaaaaatattcttcctctcaccttttaa

SEQ ID NO: 1041778 - DNA, 120 bp, Artificial Sequence
  ENSG00000233613_0 (sequence is synthesized)
tctgacagatgtgagaacaggagggcctcagaggtgcctacacgccgggaccagcctcctcttccctccggtgaggcatggacaatcagacttctgggccaggcccactgtgccccaccg

SEQ ID NO: 1041779 - DNA, 120 bp, Artificial Sequence
  ENSG00000233613_1 (sequence is synthesized)
tgatgtccgagaggttcgttcctgtgggtatgcatggctccagctgctcattttcttggccatacagaattcttgttatatacatattttatgattcataaacgctactgttggtgaaca

SEQ ID NO: 1041780 - DNA, 120 bp, Artificial Sequence
  ENSG00000233611_0 (sequence is synthesized)
cgtctcggccgcggagaaggcgagcagcgagccctctttggccaggaagcctttgccgtcctccgcgtcagcctgcagcgcctccgccttgtcgaagttaccgccgccgggcagcggctg

SEQ ID NO: 1041781 - DNA, 120 bp, Artificial Sequence
  ENSG00000233611_1 (sequence is synthesized)
cggcgcgaacttgcgggccgctgccgcctcctggtgctggggcgacgcggagaagccgccggggagcgtggccatgagcgtagagggtagatctgacgggtggaacaaggatgagttgtt

SEQ ID NO: 1041782 - DNA, 120 bp, Artificial Sequence
  ENSG00000233611_2 (sequence is synthesized)
cagagtcaagtctgcaagggtgagccagcagaatgggggtgaggtcccaacactgcaatgacctgggcagggcacttcacctgaccgaaccccaggtagagggagaatatcacctgcctc

SEQ ID NO: 1041783 - DNA, 120 bp, Artificial Sequence
  ENSG00000233611_3 (sequence is synthesized)
atgtacgaagcactctcattaacaaggtggatgatcagattgggtaattttgtttcagatcaaatgccagatgtggcaaaagactgattttcatcgttctgaaaatgacactgatgatga

SEQ ID NO: 1041784 - DNA, 120 bp, Artificial Sequence
  ENSG00000233611_4 (sequence is synthesized)
gctgccaaaatattttgagctctgactgcatcatcgaaataagtgcctggcgtccgtccccaggtgactactttgaaaggatgcattcttcacatgcaaccccttaattgtctcgtggct

SEQ ID NO: 1041785 - DNA, 120 bp, Artificial Sequence
  ENSG00000233611_5 (sequence is synthesized)
ctaaccagaaggcttctaggcccctgttcctcaaaatggggtcccaggaacagcagtctaggccacacccgggagcttgttggcaatgcaggctctcccaccccagaccggcagagcaga

SEQ ID NO: 1041786 - DNA, 120 bp, Artificial Sequence
  ENSG00000233611_6 (sequence is synthesized)
aaaggtggcttgtaatgagaagcaaaagaaaagaaaaaggaaaaagaagattctaggtgataaatgagcatcttcatcactttagctccgaagggcagaggagcattgccaggtgagcct

SEQ ID NO: 1041787 - DNA, 120 bp, Artificial Sequence
  ENSG00000233611_7 (sequence is synthesized)
catcaggctggactcaactgctggcaaattggaaagtattctttgtttcagaaggtaatgagaattcgttgccaggtcgttaaacttcgctccttcctggaggtgtggggaacgaaaaca

SEQ ID NO: 1041788 - DNA, 120 bp, Artificial Sequence
  ENSG00000233610_0 (sequence is synthesized)
cttcttcctttaggttaactcccatgaagagctttgaaagaaatagaaggatattacatcctcttggatcagtcttgcaaatggagaacctgctctctgggagaaaagtcaaatcggtcc

SEQ ID NO: 1041789 - DNA, 120 bp, Artificial Sequence
  ENSG00000233610_1 (sequence is synthesized)
cacggctctcttctcccactaagaacaactggttccttccttcagaagaagatgtgttattcccaccagtagtggtgagcgcctggattccaaaagggttaagaattcggagatgtgacc

SEQ ID NO: 1041790 - DNA, 120 bp, Artificial Sequence
  ENSG00000233610_2 (sequence is synthesized)
tgcctcattctgaagaacgtggcccagcatgtgtatgaagcaattaattgctccacaaaccctgaaaatttgatcactggccagagtaacgctgaggagccatcctgtcttctgcttgag

SEQ ID NO: 1041791 - DNA, 120 bp, Artificial Sequence
  ENSG00000233610_3 (sequence is synthesized)
tgtcttcactctggggattctggcaggctggtttcctggccagatgcttctcatccacacctgtggacctcaggaaaccaaaggtgacctctgttggcatggccttgacttcctttccac

SEQ ID NO: 1041792 - DNA, 120 bp, Artificial Sequence
  ENSG00000233610_4 (sequence is synthesized)
atgcccatgagatgtggaaattgagcgaacatccacaccagaaccatacactcaaacaagcaggttggggcagggaaactccatcacatcatggtgaggcagagatgctgcagccaccca

SEQ ID NO: 1041793 - DNA, 120 bp, Artificial Sequence
  ENSG00000233610_5 (sequence is synthesized)
gatcattgtgtagtagaggtggcaccattttactatgtgtcctccctgcactcagtgaagtctgtgaagggaggggtcagtgcagcaaggagctcgctctgccccagaggagagagtgga

SEQ ID NO: 1041794 - DNA, 120 bp, Artificial Sequence
  ENSG00000233610_6 (sequence is synthesized)
atgttcgaggacacatgaaagcagttactctgcctaccttttaaaactctttcctcctggggaactggtttattctgtactcctaaacagactatatccatgtattcactccttctataa

SEQ ID NO: 1041795 - DNA, 120 bp, Artificial Sequence
  ENSG00000233610_7 (sequence is synthesized)
atatttgagaaaaacctactatatgccaagcacttttctaggcaaaggaaatgcaatagccctttcttcccatagcttccagcctggtggggaataaaggaattaaataagcaattacaa

SEQ ID NO: 1041796 - DNA, 120 bp, Artificial Sequence
  ENSG00000256783_0 (sequence is synthesized)
agacgaggccgggagacgctgcagggagtctctgcggccgccgaggctctgaagacggagggagggcctggcccggacgggccactcctggggctgacgaggcaggcggcgggtcctccc

SEQ ID NO: 1041797 - DNA, 120 bp, Artificial Sequence
  ENSG00000256783_1 (sequence is synthesized)
caggccccagcagaaccggccttgctcgccccacactgggcttccaacctccagagctgcgagatgataaatctgtgcggcgttgcggtcacttgctccggcagccacaggaagctctca

SEQ ID NO: 1041798 - DNA, 120 bp, Artificial Sequence
  ENSG00000256783_2 (sequence is synthesized)
catgacgcggacagcggcggacatgaggaaaggccagaggcagcagccagcccatctcaggcccgtcaccgtggaagcagcggccggaggagccacagaaagcaaaactcccaaagccgc

SEQ ID NO: 1041799 - DNA, 120 bp, Artificial Sequence
  ENSG00000256783_3 (sequence is synthesized)
ccacgtacttcgggtcttagcttggatctcctggagacaggccctgcgaaggagctgggctgggagcaggtttatcagggcgtgatcttaggaggcagatgtaggaggtgaggaaggcag

SEQ ID NO: 1041800 - DNA, 120 bp, Artificial Sequence
  ENSG00000256783_4 (sequence is synthesized)
gccccaggctgagaccaccttgggaggggtgtaaccttgtgcaggggggctctctgcagcggagggcagtcctggggaggacacggctgaggacacatgcagtgacgtcccagcgttccc

SEQ ID NO: 1041801 - DNA, 120 bp, Artificial Sequence
  ENSG00000256783_5 (sequence is synthesized)
agcagtggggagggtcgggggggcatccagtgcccacgacactcatgaacacaaaaaccaaccagagaaaacccagtctccagcaaagagccgagtgctgagtgtgcagcgttctccgcc

SEQ ID NO: 1041802 - DNA, 120 bp, Artificial Sequence
  ENSG00000256783_6 (sequence is synthesized)
tgtctctccccctttcgcacctctatcccaggcaggccctccctggccttgccaccatgccggaccaccgtgtggaccctgtgctcacccaggcctcacctttcagccccctaagctggg

SEQ ID NO: 1041803 - DNA, 120 bp, Artificial Sequence
  ENSG00000256783_7 (sequence is synthesized)
cccaaagcagcagactgtgttatggagggtgctgtggctcacggcccccaccccctgctaggcagagttgccgggtaaaagacaggataaccaattaaattagaacgtcagagaaacaca

SEQ ID NO: 1041804 - DNA, 120 bp, Artificial Sequence
  ENSG00000232640_0 (sequence is synthesized)
ttgtgtagttttgtggcctttgtgcaagattcagacaagaagtgcggcggaagcttacacctgcacgtggtgggacagaggcaagaacggatggtctggctgaggctgagagaaccaagc

SEQ ID NO: 1041805 - DNA, 120 bp, Artificial Sequence
  ENSG00000232640_1 (sequence is synthesized)
ctctctgacctgaggcaactataatgaatggaaaggaaaccggattgtactttaaatccgagaacattctctactctccagaacaagtcatctgcaggcgcaggcagtggaatccgtgag

SEQ ID NO: 1041806 - DNA, 120 bp, Artificial Sequence
  ENSG00000232640_2 (sequence is synthesized)
gccagctgtacggcgggccgccccggacccaggcttggctcctcactttccgctgtttttagtgcggtcctacaagtgccctggtgcagcccgagatcagtaataaatgcagctgaaata

SEQ ID NO: 1041807 - DNA, 120 bp, Artificial Sequence
  ENSG00000280837_0 (sequence is synthesized)
aataaaacacttgcttttctttttgagaaaaattaggttctttttcatctatttaattattgcccatgtcaaatgcttggttttgaaaactgaggaattctatctgacaaagatgaaacc

SEQ ID NO: 1041808 - DNA, 120 bp, Artificial Sequence
  ENSG00000280837_1 (sequence is synthesized)
agctatagttgcttgtaaatcatcctttctagtgatcacataaaatgaacagtagacagcaaataatttaggaattgaacctatacatttatcttataattttgctgacttaagtttccc

SEQ ID NO: 1041809 - DNA, 120 bp, Artificial Sequence
  ENSG00000280837_2 (sequence is synthesized)
tttcttggtttatgatgccagcagaacttctgtgtaaaattatagtctgttctactgttctcagtttcaggcaactgatttcaaatgcctatgaaaccactccaattaagccacatgggg

SEQ ID NO: 1041810 - DNA, 120 bp, Artificial Sequence
  ENSG00000280837_3 (sequence is synthesized)
gtgctagaaacttatagtatgccagtcacagcagtggaaaagacctggggtggaaaatagcagatgttattgtgatttaaatttccacttgacatacgttctgatttttggacaaattca

SEQ ID NO: 1041811 - DNA, 120 bp, Artificial Sequence
  ENSG00000280837_4 (sequence is synthesized)
atgttttaattgaatagttttcgttacaaccagaaggcaggttgagattctaactaagcataaataagggtatattgatagtgaaaaaggtccttggaggattaaaacaacacactgtta

SEQ ID NO: 1041812 - DNA, 120 bp, Artificial Sequence
  ENSG00000280837_5 (sequence is synthesized)
cagatcatttataatatttttctgacttccacattctgttgcatttatttgccgacaatttgacattttcaatctccattttctggcataaatatatttgtaaatagggatattttctat

SEQ ID NO: 1041813 - DNA, 120 bp, Artificial Sequence
  ENSG00000280837_6 (sequence is synthesized)
tgttcataatgatctacatttaaaactctttatgtaaagctttatatcatttcaaaaatttcaaaaacttacacttaaaatcatctctactgtataaatttgtttttgatccagggaggt

SEQ ID NO: 1041814 - DNA, 120 bp, Artificial Sequence
  ENSG00000280837_7 (sequence is synthesized)
tgaagtgtctattatatagcaaaagctaaagtaaacctgaagtggaactcacagatgatccacggcgttagcaaacctaaaccctgaactcattatctgagtgtcactttatggtttaat

SEQ ID NO: 1041815 - DNA, 120 bp, Artificial Sequence
  ENSG00000280837_8 (sequence is synthesized)
tcctttctttttgaagtgtcattgatgcacgcatagcaatttgataatgattgttatttagcggtattagataaataacaagaatagatggccactaaagctacctgtctccatcatttt

SEQ ID NO: 1041816 - DNA, 120 bp, Artificial Sequence
  ENSG00000280837_9 (sequence is synthesized)
agaatacgacagctgatggaatgaatgttaagtatgtaaggccttgagtttccttgccctattttaattatactcaccattagtctgggtctgagtcctctgctttttctcggcccctca

SEQ ID NO: 1041817 - DNA, 120 bp, Artificial Sequence
  ENSG00000280837_10 (sequence is synthesized)
atatccagggaggcttagtcatcaaggtacgtactgctccaacagtaacaagagctccctattaatgacctatagctgacttacatattgcgagtttggagagaggctgagaagattagt

SEQ ID NO: 1041818 - DNA, 120 bp, Artificial Sequence
  ENSG00000280837_11 (sequence is synthesized)
tgttctttttcatttgtatttatttatggtttactttgaagatctcaactgcttctgtgttagaatggctgtctttagctgtaggcctaggagctagcgatttatttggtgtgcgttcag

SEQ ID NO: 1041819 - DNA, 120 bp, Artificial Sequence
  ENSG00000280837_12 (sequence is synthesized)
agaactccaaaattctcctgcctcaacatctatctctgctgccaatgtaccgcactccctttgtacttttcatagagatccttgagaagacaggcagtggggctctcacttgggaaaaga

SEQ ID NO: 1041820 - DNA, 120 bp, Artificial Sequence
  ENSG00000280837_13 (sequence is synthesized)
gaagtaaattaagagaaaaaatatagaatgctagacgtgggttttctggttccacccttgtgcattggaaggagcagactatggagccagagattggtgcgcagtcctccccactgtaga

SEQ ID NO: 1041821 - DNA, 120 bp, Artificial Sequence
  ENSG00000280837_14 (sequence is synthesized)
atcagacgtacatcacctctttcatttctccagattcatgttctttctcttaatctctgcttctagtttttttgtgaagcttaatttatataagtataaatgacatctgacatattgtga

SEQ ID NO: 1041822 - DNA, 120 bp, Artificial Sequence
  ENSG00000280837_15 (sequence is synthesized)
gggcccaagaaaatttttcctcttttcccctgaaaataaaaatgctacttgttgtaataaaggttactttatgattttagatatgtattatatattatgattttagatatgtagatatga

SEQ ID NO: 1041823 - DNA, 120 bp, Artificial Sequence
  ENSG00000280837_16 (sequence is synthesized)
tagttaaatatttaaagattcattttcagactcacaatttttatttgcttttatattttgcaatgtatcatttcttaatttcctttatgatgcatcacttattttaatatcagacctatt

SEQ ID NO: 1041824 - DNA, 120 bp, Artificial Sequence
  ENSG00000280837_17 (sequence is synthesized)
ttttaaaggaagcaattgatagctacgatgcaaatgctattcttattaaaagataaatagctttcccttatgctaatgaataaaaattcctactctacagttgttaatcaatctcgagtt

SEQ ID NO: 1041825 - DNA, 120 bp, Artificial Sequence
  ENSG00000280837_18 (sequence is synthesized)
ctaaagtccgataaacacatttaatagcagaggatgagcatatcattaaattgatggtcagtctctgacttgtgtttacatatagtcatctgaaatgaagttcagaatttgagtcccaaa

SEQ ID NO: 1041826 - DNA, 120 bp, Artificial Sequence
  ENSG00000260951_0 (sequence is synthesized)
gggagcatcccagcagagcaaagacaggcacttctctcccacgttcctcctaaggaggcttagcaaccctcctactccttaggaaccctacctcagggttagacaaccaggcctcagagg

SEQ ID NO: 1041827 - DNA, 120 bp, Artificial Sequence
  ENSG00000260951_1 (sequence is synthesized)
gacaacccccacccaacgtgttcccaggtttgcttacaattaattgccttcctccatgggaatttctctgggcacatcccttttgcatcatggccttgtggaatcagtcctgctgtacca

SEQ ID NO: 1041828 - DNA, 120 bp, Artificial Sequence
  ENSG00000260951_2 (sequence is synthesized)
agagaccctcctgtcaccatcccacgaagctgcagaatgcattctgggtgaccacagcaggcgactgtcccccggtggaactccagcactgacaaagatggcagcagagagtcagctaat

SEQ ID NO: 1041829 - DNA, 120 bp, Artificial Sequence
  ENSG00000260951_3 (sequence is synthesized)
ggggaaatgcttccaaaatgagctacaagtcagtttacaaaaatggagaagggggaaaaatctattaggctgcaatctcttgttgggaaatgtgtttctaaagggagtttacatgccatg

SEQ ID NO: 1041830 - DNA, 120 bp, Artificial Sequence
  ENSG00000260951_4 (sequence is synthesized)
acattgtagagaactgcccaaagctatgcagctggaaagacacgaatgcatttgcttcagcaaaagagacatgtatcttagaaacctatcaaaaatatttgaatacagctacctcggcaa

SEQ ID NO: 1041831 - DNA, 120 bp, Artificial Sequence
  ENSG00000260951_5 (sequence is synthesized)
tctctgctctacgggctcctccccccacctttcttttaacctttgcctgagaagaatttaaatggcatatttagtggctgtatattgtgcttcctgtacccactgctgcataaaagggat

SEQ ID NO: 1041832 - DNA, 120 bp, Artificial Sequence
  ENSG00000260951_6 (sequence is synthesized)
tgatttaaatcgcttacagtaaccatgtgggggaggagggtctagttttctgcaccaaatgctccaggatgcataataagcaaccacaaatacagacaacaaatgagtgtgcttgcattt

SEQ ID NO: 1041833 - DNA, 120 bp, Artificial Sequence
  ENSG00000260951_7 (sequence is synthesized)
gtctcttctctggtaaagaattattctttagtacggatggactgcacacttttagcatcaacaagagagcagctcagatgtgcgagcaccaataaaggatacttaagcctccgtccccca

SEQ ID NO: 1041834 - DNA, 120 bp, Artificial Sequence
  ENSG00000260951_8 (sequence is synthesized)
ggtaatgagtctcagaaatgttggctaaaaaagtcagagaatgttcctatttataatttttttgaatcatgaaatttataacacctcccaaagcaggaacggaccaagtttaaagattac

SEQ ID NO: 1041835 - DNA, 120 bp, Artificial Sequence
  ENSG00000260951_9 (sequence is synthesized)
tgttaataacaatcggctgaaaagcaagacacagctcatgctttggagccgtactaagagattcggcatctctaaaatcgctagagcctttgacaagccaggcataaatcaggagggatt

SEQ ID NO: 1041836 - DNA, 120 bp, Artificial Sequence
  ENSG00000260951_10 (sequence is synthesized)
taaattcctgattttctggcattttttaagctataaatcctacacattcctaaaaccacatggtcccataactggagctgagggctagagtaggtccctggaacagttcaaagggtcaaa

SEQ ID NO: 1041837 - DNA, 120 bp, Artificial Sequence
  ENSG00000260951_11 (sequence is synthesized)
ctggaattaggagctcctgcttctctctaggccttaaggcaattttttctgaaggacatttaaagattttttttttaaagtcttctgaaatgaggccaagagggtgttacatttatccca

SEQ ID NO: 1041838 - DNA, 120 bp, Artificial Sequence
  ENSG00000260951_12 (sequence is synthesized)
acaatctaccagggctttctcgtctttggatgtaaccatgttgggatttttctagatcttattaatccatgtctatatactcaagatggtttggatagtcagaggtcagaaaacaattaa

SEQ ID NO: 1041839 - DNA, 120 bp, Artificial Sequence
  ENSG00000260951_13 (sequence is synthesized)
aggagggagactaaatggtctataaatgaatgtgatctattcagggtttcttaaaatgagcttaaggaccatttgccttcctggagagagatgtggatggaagaggtgtcctgctccaat

SEQ ID NO: 1041840 - DNA, 120 bp, Artificial Sequence
  ENSG00000260951_14 (sequence is synthesized)
ccatgactttagcatgaggaaagcattcaggatgaatgaaagaaagaacagagcagaatcaggatgcctgggtaagagacaataagtcaaaataagatgaaatgagaacccaaactacag

SEQ ID NO: 1041841 - DNA, 120 bp, Artificial Sequence
  ENSG00000260951_15 (sequence is synthesized)
agtggcagcgaaaatgcagagtgaatgtggaaaacttgatgaaggtaaaatctgaagatcttggcacctaattggattcgcatgaggagaaccagagaagggagagtcactcatgtccgg

SEQ ID NO: 1041842 - DNA, 120 bp, Artificial Sequence
  ENSG00000260951_16 (sequence is synthesized)
gaggaaagagcacagcatttgtaacctagaaacctggactgaaggtctttattctgccatttactagttttgtaaactctgggaagccattcacctctgagtctcatttttatcggttgc

SEQ ID NO: 1041843 - DNA, 120 bp, Artificial Sequence
  ENSG00000260951_17 (sequence is synthesized)
ggtgaggctcacaaagccaagggccctaagcacacaggggactggagaacagacattttccttctgttcttcaaccattcagtgaacagctgggcaccaagaaaatgagcaggtgatttc

SEQ ID NO: 1041844 - DNA, 120 bp, Artificial Sequence
  ENSG00000260953_0 (sequence is synthesized)
taggtgaagaagcccattggaaaaggctggatactgtgtgattccaactccatgacattcaggaaaaggcaaaaccatgaaaacaagaaagatcagcagctgccggggctgggcagaggg

SEQ ID NO: 1041845 - DNA, 120 bp, Artificial Sequence
  ENSG00000260953_1 (sequence is synthesized)
tgactggcaggagcacagagtgcaggaaggatactgaattccttgaaacgttgacctccaagatgctaactcaggtgggaggaattcaagacaaggaaggagcctcttttgggttctggt

SEQ ID NO: 1041846 - DNA, 120 bp, Artificial Sequence
  ENSG00000260953_2 (sequence is synthesized)
ctggcgtggagaggttttactcttgggaggcccaggagaggcagagggtctgggccagggagggctggtgtccacggcactcccggttccgggctccaagtgtgtggggggagggtggcc

SEQ ID NO: 1041847 - DNA, 120 bp, Artificial Sequence
  ENSG00000260953_3 (sequence is synthesized)
actcaaaggagagagcctcagaaggagggcactggggacccaggtactgctgaacccaaagaaatgagccgttaaaaaggagagaaatgtgtgtggaagcccggagctccatgggcaggg

SEQ ID NO: 1041848 - DNA, 120 bp, Artificial Sequence
  ENSG00000260954_0 (sequence is synthesized)
gggacacagaaccaaaccatatcacctcgctagatgggatttcccgcgtcaggtgcttgatggtgaaaatgaatcctaggacagctgtttaatctgtggctgtcacttcagaaatcggga

SEQ ID NO: 1041849 - DNA, 120 bp, Artificial Sequence
  ENSG00000260954_1 (sequence is synthesized)
ggctggtgccttctggaggctctgagggtgagcctccagctcttccaccttgcctcttccagcatgaggtggcgctggcaggctttgctgttccttggcttgtgcacttgaccttgaacc

SEQ ID NO: 1041850 - DNA, 120 bp, Artificial Sequence
  ENSG00000260954_2 (sequence is synthesized)
acaaggtctgaactgcaggggccacttagatgcacatttcttctggttctgccaccccgagacaccaagatcagcaacctcctctgcctgttcagtgtgaagatgatgaggatgaagagc

SEQ ID NO: 1041851 - DNA, 120 bp, Artificial Sequence
  ENSG00000260955_0 (sequence is synthesized)
tgcttttggatacttaagtgaccacctcacttttttgtgatgcagcttgttcaatttttggatagttctcgtggacacatggaaatgctgagtagaactatgatacaaatcagctcacca

SEQ ID NO: 1041852 - DNA, 120 bp, Artificial Sequence
  ENSG00000260955_1 (sequence is synthesized)
atgagataaggagtgatggcgcttgccagtaatcccagctattccagaggtcgagctggaaggatcccttgagccgagtgcgaggctgcattgaactattaccacaccactgcactccag

SEQ ID NO: 1041853 - DNA, 120 bp, Artificial Sequence
  ENSG00000260955_2 (sequence is synthesized)
cctgggcaacagagtgagacctcatctctggacaagtgttatttgtgacagcacaatgtttgatacaacccaaatgttgaatgaaagtggaccagctaaataaaccatgaacatttactc

SEQ ID NO: 1041854 - DNA, 76 bp, Artificial Sequence
  ENSG00000260957_0 (sequence is synthesized)
tgaggcaaagtctctctctgtctccaggctggactgcagtggtgcgatctcagctcacggcagcctccgcctcctg

SEQ ID NO: 1041855 - DNA, 120 bp, Artificial Sequence
  ENSG00000260957_1 (sequence is synthesized)
ctacagggtagtccttttcagcttctaagagctctttaaactagtaaagccctgccataatgcacctaaaaaactgagatataaaatgtgtagtaacacattttccttaacatgaatgaa

SEQ ID NO: 1041856 - DNA, 120 bp, Artificial Sequence
  ENSG00000260957_2 (sequence is synthesized)
agcagtcacttcccaaccctactgcccatcacccaaaacactaggagaaaataagaatgttggcttttcccagtctccaccatcagtagcaaggtacacaaagcccaagttaaaggaatg

SEQ ID NO: 1041857 - DNA, 120 bp, Artificial Sequence
  ENSG00000260957_3 (sequence is synthesized)
tttctgcagaggctttactgtaatgtggatttagccctttctatttttctaactcactgatttctgcatgtatatctttaataatttcccccttcttctttccttcgggttttttgattg

SEQ ID NO: 1041858 - DNA, 120 bp, Artificial Sequence
  ENSG00000260958_0 (sequence is synthesized)
aaacttcgaacaggacaagcccgaagcccgcttctccgggagacggggtgccacaattgcaaggatgctgaaatgagaccttttatgtcagagactactcggcctccactctaaaatgac

SEQ ID NO: 1041859 - DNA, 120 bp, Artificial Sequence
  ENSG00000260958_1 (sequence is synthesized)
ttggttgatggaagaactgattccctgaggaggggaaagattcagggaagagcctgtcctgggtaatgagaagaacattgaaaagagcatcacatcagaatatcgaggtgggcctggaag

SEQ ID NO: 1041860 - DNA, 120 bp, Artificial Sequence
  ENSG00000260958_2 (sequence is synthesized)
ttggtgggagtgtggcctggatgtggaaggcgggacctgtctttggctcacctgccttcccacagctcacctggagctgtggcaccagcattagagcccggtcatggagtgtggtgccct

SEQ ID NO: 1041861 - DNA, 120 bp, Artificial Sequence
  ENSG00000260958_3 (sequence is synthesized)
gtcacaccacctctgtgatggagaacaagttcagcagccttcagtagacatacaagctggacagccagggcttctggccaaccagacgcagcaagatggaattccactgcaaagtgtaca

SEQ ID NO: 1041862 - DNA, 120 bp, Artificial Sequence
  ENSG00000260958_4 (sequence is synthesized)
gcaacttagtatgtggagatgaacagcagcaaggtgtttttaatggcatgccctatgccaccatgctcaggggagatgctgctgcttgccagaagcatggggatggcaggcctgaggctc

SEQ ID NO: 1041863 - DNA, 120 bp, Artificial Sequence
  ENSG00000260958_5 (sequence is synthesized)
cacttcactgaactctaccatcattatagaagttttggagtagcctacgaaagacagaatcatgtcattggtcagaagacaaaatcctgtacagtgagtagttctcactgtagatatgta

SEQ ID NO: 1041864 - DNA, 120 bp, Artificial Sequence
  ENSG00000260958_6 (sequence is synthesized)
gatttattaccctaaaaacaatgctaatttggcattggttcatgtagcacctgctatgaacaaatgcctaaaattagaagcagtttctcctaaagtaagattacatgaggccaggcgtgg

SEQ ID NO: 1041865 - DNA, 120 bp, Artificial Sequence
  ENSG00000260958_7 (sequence is synthesized)
ctatgttggtctgcgagaaatcaaacttcgaacaggacaagcccgaagcccgcttctccgggagacggggtgccacaattgcaagatctcaggtccgggaggcccaatttgatgagctct

SEQ ID NO: 1041866 - DNA, 120 bp, Artificial Sequence
  ENSG00000260958_8 (sequence is synthesized)
aaaggctggcctgaaatttataattatggtcacaggcagcccactcaggtgcctagcagcttagtcagcaagctaaggactaaagttttgcctctaacttaagggagtcttgtggtcctt

SEQ ID NO: 1041867 - DNA, 120 bp, Artificial Sequence
  ENSG00000260958_9 (sequence is synthesized)
tgtagctttgctctcagcccacatagaagctttaaaagagaatgttgaaacgtttgtagaggatggttttaaggcaatgtactttaaagtgtgacataaattgtgtgttgaaaaaagtaa

SEQ ID NO: 1041868 - DNA, 120 bp, Artificial Sequence
  ENSG00000260958_10 (sequence is synthesized)
gaggagcgttaccatggcaaccgtgccgcggaggccttgagaggccacacgccctatgttggtctgcgagaaatcaaacttcgaacaggacaagcccgaagcccgcttctccgggagacg

SEQ ID NO: 1041869 - DNA, 120 bp, Artificial Sequence
  ENSG00000260958_11 (sequence is synthesized)
gggtgccacaattgcaaggacccttgctccacagaattctttgcctggaattttcttcccagaatctttgcatgtcattccctctgttgctgagttaccgggatctcaatgtaaacgtta

SEQ ID NO: 1041870 - DNA, 120 bp, Artificial Sequence
  ENSG00000260958_12 (sequence is synthesized)
cgtactgacagaggctgctgtgaactgaattgcgtgcttcccaaaattcatatgttgatactgtcacccccggtacctaaggatgtgactacatttggagatagcatcatcaaagaggag

SEQ ID NO: 1041871 - DNA, 120 bp, Artificial Sequence
  ENSG00000260958_13 (sequence is synthesized)
ctgtctgctcaggaatgtttcaggcttggtctcccttttaatttacctcgtaaatcattttgtaatttttatctcctacccattctgtaacttgttaattacttttatacacatgtaata

SEQ ID NO: 1041872 - DNA, 120 bp, Artificial Sequence
  ENSG00000260958_14 (sequence is synthesized)
tcttttatgtgtgatttctaagtatattactagtgaacattgactgttacaaggcataccttgtcttattgcaatttattgtgcttcccaagtgttggatttcttacaaattgaggggtt

SEQ ID NO: 1041873 - DNA, 120 bp, Artificial Sequence
  ENSG00000260958_15 (sequence is synthesized)
ttggcaaccttaccttcagtgactctgtcaacaatattttttccaacaccatgtgatctgtgtgtgtgtgtgtatctttgtcagcatttttatcaataaagtacattttttattaaggta

SEQ ID NO: 1041874 - DNA, 120 bp, Artificial Sequence
  ENSG00000260959_0 (sequence is synthesized)
caggatgatgatattccccaaggccttggtttatctgatctcaaaacatctacataaaggaacacacaatgggagtgatgtcctcgccaacctagtgcaaccacatctcagtagcccaca

SEQ ID NO: 1041875 - DNA, 120 bp, Artificial Sequence
  ENSG00000260959_1 (sequence is synthesized)
cccttcaaagactgaaagtctcaagatgtaaccttgaagcaaactgcagaagccattgctttagtcttcaagtagaacgctgaaatatactttggaaccacaccccattcagtttcccac

SEQ ID NO: 1041876 - DNA, 120 bp, Artificial Sequence
  ENSG00000260959_2 (sequence is synthesized)
tgtacacatccattccttatacacatttatctaactgtatgctggcgaaactcacaccatgcatacttatctaactatatacctgtcaaaaaaataccagaggctaatttaaaatgaacc

SEQ ID NO: 1041877 - DNA, 120 bp, Artificial Sequence
  ENSG00000287852_0 (sequence is synthesized)
gcttagtttttggatgtgaatccactgagccggtgcgtgccttaaataaacatcctcttatattccccatttcgatctctctggtcctcagtttaccacaacattttggcaagccagcca

SEQ ID NO: 1041878 - DNA, 120 bp, Artificial Sequence
  ENSG00000287852_1 (sequence is synthesized)
ggagtggagatgacaggcttactatctcctttgcctgtggggctggagccccgggtcaagggaaaactgtgaccccaggcgtggctgggagaacttcagcccagaggggagataggctct

SEQ ID NO: 1041879 - DNA, 120 bp, Artificial Sequence
  ENSG00000287852_2 (sequence is synthesized)
cctgtgacccagtgcccctacccagcagtgcaacagaacctgagaggggctacaggaggattaccaggagcagcatgcttcaggaaccacgttgcaggtgttgtgccttggatccaccac

SEQ ID NO: 1041880 - DNA, 120 bp, Artificial Sequence
  ENSG00000287852_3 (sequence is synthesized)
agtctgctgaaaccggaagctcaggacaagtggaccagccagcaggacccagatcatccaatcccgctgatcctaagacgagaccaagctgctgttaaagacaaccagcctgctgtggtc

SEQ ID NO: 1041881 - DNA, 120 bp, Artificial Sequence
  ENSG00000287852_4 (sequence is synthesized)
actccggaagctgaccagtctactcatggctgaaacttgaggagacaacaagccctgctctagtcatacaccggaagctgactagtctatacatggctgaagcttgaggactcatcaagc

SEQ ID NO: 1041882 - DNA, 120 bp, Artificial Sequence
  ENSG00000287852_5 (sequence is synthesized)
aagtaaaggtggttagaaatcttaggactagtagttttccttgtaatactaactgttttcctattgttctgttgctgtgctcaacctcctccccctcttctgtccttgctggatatgaat

SEQ ID NO: 1041883 - DNA, 120 bp, Artificial Sequence
  ENSG00000287852_6 (sequence is synthesized)
atgccatacattgttttgctgttgttaccccccttaaccatgctagaagaagcacctatagaagggtgtccccactgtacacatactacctggtcaaggaacagtataactataactcta

SEQ ID NO: 1041884 - DNA, 120 bp, Artificial Sequence
  ENSG00000287852_7 (sequence is synthesized)
tcgtaccatacttataagtgtacaaggactcacttaagaacttgtacttacaatcagaccacctattcagtctgtgacccagaggatggccagccttatgtatactatgaccctaaattt

SEQ ID NO: 1041885 - DNA, 120 bp, Artificial Sequence
  ENSG00000287852_8 (sequence is synthesized)
tcacctggtgaatggtttgacattcacgcagagtcaaaggaaggtccccttttaaaaccagaccaaggtccctcttttttaccaagggcctatttctctgtactttgatgcctgtcaggc

SEQ ID NO: 1041886 - DNA, 120 bp, Artificial Sequence
  ENSG00000287852_9 (sequence is synthesized)
cccctgggaccccagaaaaacattgtcagtaatgcatatcatggcaccctagcacacaacaaaggccaattatgcttactgaaatgccggtaaaccagattatgaaacaaaaacctgtaa

SEQ ID NO: 1041887 - DNA, 120 bp, Artificial Sequence
  ENSG00000287852_10 (sequence is synthesized)
tcctgtaaacttcaccattctaaagccagacctacccatgtggactgcaggttgccccatacatgtctacatacacacatacccagcaacttacctatatgttatcaaaaaaggaacccg

SEQ ID NO: 1041888 - DNA, 120 bp, Artificial Sequence
  ENSG00000287852_11 (sequence is synthesized)
gagccgtccagcccagcaacagttccaagtctttaagtcattctataagcatgtagaccaaaagttaccagagcctcctcctgtagccaaaaatctgtttgctcagttggctgaaaacat

SEQ ID NO: 1041889 - DNA, 120 bp, Artificial Sequence
  ENSG00000287852_12 (sequence is synthesized)
tgctggcagcctaggcatttcctcatgttatgtttgtggaggaactaacatgggagaccagtggccttaggaagcaaaagagtcaatgccacaagataattttactctgactgacttttc

SEQ ID NO: 1041890 - DNA, 120 bp, Artificial Sequence
  ENSG00000287852_13 (sequence is synthesized)
taattttactctgactgacttttcccccaaaccgatgcccacaagttcaagcgtctggctcttaaaaacttctattaggccaggcgtggtggctcactttgggaggccaaggcgggcaga

SEQ ID NO: 1041891 - DNA, 86 bp, Artificial Sequence
  ENSG00000287852_14 (sequence is synthesized)
gcactccagccagggcaacaagagtagccacttctattatcaggagatactgtgttgcttactggggaaaagcttttacagaccga

SEQ ID NO: 1041892 - DNA, 120 bp, Artificial Sequence
  ENSG00000287852_15 (sequence is synthesized)
atactgtgttgcttactggggaaaagcttttacagaccgagtaagagaattaacatgcttaggacagcaatattataatgaaaacctaagaaaaactttgtggcgaggtaaaaatcgttc

SEQ ID NO: 1041893 - DNA, 120 bp, Artificial Sequence
  ENSG00000287852_16 (sequence is synthesized)
caaatcacctcatccaaatccattctcctgctttctcttctgtaaatcacacctggtatcagcctgaagctttttggatgtgaatccactgagctggtgagttccttaaataaacatcct

SEQ ID NO: 1041894 - DNA, 120 bp, Artificial Sequence
  ENSG00000229483_0 (sequence is synthesized)
ccagaagaagaaggcaacaacaggaagaggagaagcagcaattcagaaagacacactttcttcttcgcttgccctgaatcggatagtgcttgaagcctggatttgtcagcagccacacaa

SEQ ID NO: 1041895 - DNA, 120 bp, Artificial Sequence
  ENSG00000229483_1 (sequence is synthesized)
ggctgaggacagagaaaaactgatggccatgcttaggccatggatcaaggcatgcccaaaccagccccaatcttgtgcttctccgttatgccagtcaataaattgcctttgttgttcaaa

SEQ ID NO: 1041896 - DNA, 120 bp, Artificial Sequence
  ENSG00000268355_0 (sequence is synthesized)
ctcaaaccacaatcacagttgttggttccagaaacatcttctttggaaaaacatgtgacatcagtttcctcagagtctcccggacaatccagtcacgcagaactgacaaaaccttgtcca

SEQ ID NO: 1041897 - DNA, 120 bp, Artificial Sequence
  ENSG00000268355_1 (sequence is synthesized)
gtaagaagatactttcttccgtaattcaagataaagaaaattacaatctctgctgtccattccatcgcttttcccttcagaatcataatcagagaatccttgcagaacgtcgtgagtgtg

SEQ ID NO: 1041898 - DNA, 120 bp, Artificial Sequence
  ENSG00000268355_2 (sequence is synthesized)
ggagagaggttgctggccaatgagcttgagcttcgtcatccttccaagccccacccagttcctttgcttccctttcaccaactttgactgaaatgaataggttacaacctttagctttct

SEQ ID NO: 1041899 - DNA, 120 bp, Artificial Sequence
  ENSG00000268355_3 (sequence is synthesized)
gccccttggaaaacggaagcatttagacatccgtattaatatttggatctagagtgttcgtgttttagcacttccttttttgaaaggagaagcagacgtgttgtgtttttaggaacactt

SEQ ID NO: 1041900 - DNA, 120 bp, Artificial Sequence
  ENSG00000268355_4 (sequence is synthesized)
ggacaatccagtcacgcagaactgacaaaaccttgtccagtaagaaggtaagaatcttcttcaatagagaatacgtcaacgtctccgtgaacgaagagatctgctggttccaaggacttg

SEQ ID NO: 1041901 - DNA, 120 bp, Artificial Sequence
  ENSG00000268355_5 (sequence is synthesized)
taaccccttgaagcactgagagtttccctgctgatattcttagactgttctttttctaaaacgagaaagaggtaagttctctttttttttttacactgcccaaaactctctctgctcagt

SEQ ID NO: 1041902 - DNA, 120 bp, Artificial Sequence
  ENSG00000268355_6 (sequence is synthesized)
gctgggcactggaaaacaatggccctctctctggaaaccactatctgccatctcaagggcccactacaggtctgcccagcattttcatcccttcctcaagtctggtgcccaggaccctcc

SEQ ID NO: 1041903 - DNA, 120 bp, Artificial Sequence
  ENSG00000229484_0 (sequence is synthesized)
cctgcctttcttccccagcgtcaccatctgtggcagcctgggatacgcatgagctcctcaggagggcggctccgtggaacacacatctggatgacaggagggagccaggagctgtgagaa

SEQ ID NO: 1041904 - DNA, 120 bp, Artificial Sequence
  ENSG00000229484_1 (sequence is synthesized)
ggcgtcaggggcacatggccagccctcttcaccccacagtctgccccaggccagccccactaggagtgacccattttctcctagcaggattccttgcatggggtggcctggacccaaaac

SEQ ID NO: 1041905 - DNA, 120 bp, Artificial Sequence
  ENSG00000229484_2 (sequence is synthesized)
acccgctctgaggattccctgttaaccacagagaaggttgactcaagtttctttatttggccatgaaactgtggggcatctcacggtgcttcttgggtccactggagagccctggaagct

SEQ ID NO: 1041906 - DNA, 120 bp, Artificial Sequence
  ENSG00000229487_0 (sequence is synthesized)
ttttaaaaaatcatttaaattttccttttaaaaagttttgagatataaatgacatacaggctgaagtgcaagtgcagtggtgtgaacacagctgactgcagcctcaacctcctgggctca

SEQ ID NO: 1041907 - DNA, 120 bp, Artificial Sequence
  ENSG00000238102_0 (sequence is synthesized)
aggagaatgaggcaagccaagctgtgaggagtctgtgggtcatggctttggcagcgtggaacctgggacatagagtcccccttgatacggctgttcagcagaccaactttgttgtaaata

SEQ ID NO: 1041908 - DNA, 120 bp, Artificial Sequence
  ENSG00000238102_1 (sequence is synthesized)
tttagataaaaatgggctttagagcagccacatctgaagacccacaaggctgaatgttacacagggggagcaccattatttaatctgaacatctggaatccatcatgtgtagtgaaggac

SEQ ID NO: 1041909 - DNA, 120 bp, Artificial Sequence
  ENSG00000238102_2 (sequence is synthesized)
aagatgtatcctcatttttaagccaactccatgataaaattgatggatgggaccaatgtgtacaggtgaagaagattgatacttaagatctgtatgttgtgataggaagatcataagagg

SEQ ID NO: 1041910 - DNA, 120 bp, Artificial Sequence
  ENSG00000238102_3 (sequence is synthesized)
acttttattctgcttcatttttttttactttatttcattatattgtattttattttatttatggcacagcaatcagaatctgattgaagataaactcatcctatttggatcagagcatta

SEQ ID NO: 1041911 - DNA, 120 bp, Artificial Sequence
  ENSG00000238102_4 (sequence is synthesized)
gaagaaagaaagaactgacacttctcaaccttctctagttgaagacttctctttgctataactacttgaagagttcagcagaaaaattttactgaagaatccctgatcctcctttaagta

SEQ ID NO: 1041912 - DNA, 120 bp, Artificial Sequence
  ENSG00000238102_5 (sequence is synthesized)
gctgtagagaatattcactaagtgtaatgggacacgtctctctcatgcccacttcttttctcttatccctgcaagaaaatgaagttttgttggagtcagaggtttattttagtttatttt

SEQ ID NO: 1041913 - DNA, 120 bp, Artificial Sequence
  ENSG00000238102_6 (sequence is synthesized)
aatcagaaacgtgtatgaaatccaaagcacatgatcttcatttttaataacgtaaaccatccccatgtttatgtgctttctctggtcctcaacctttttttttctttttaattttaagaa

SEQ ID NO: 1041914 - DNA, 120 bp, Artificial Sequence
  ENSG00000238102_7 (sequence is synthesized)
catctgtccccactgcaacttcactttcatcaggaaatctaattacagagatagaaaagagtatagtaggtgaagcaaaagacagcagctccacctcttaatactgaatacttagatgac

SEQ ID NO: 1041915 - DNA, 120 bp, Artificial Sequence
  ENSG00000238102_8 (sequence is synthesized)
agtgatatggatatgaaagacattagggagcatacaaatgcagtttggccaggatttatttctagttatggactgatgaggagacatggggaaaaattgtcaaattaaaaaaaatctttt

SEQ ID NO: 1041916 - DNA, 120 bp, Artificial Sequence
  ENSG00000238102_9 (sequence is synthesized)
tggcaaatttaaactttgcctctatcctttttctcttaatctgctacccagatatgcacttcaaataggaatgtgggcctactggggcatgaaatagttgagagctattcaacaatgagg

SEQ ID NO: 1041917 - DNA, 120 bp, Artificial Sequence
  ENSG00000238102_10 (sequence is synthesized)
agaatgagagaaatctatttagaaggacattttagaatttaagccagttgaaccttaatagtcacagataatttaacatgacccctaaaccattaggggggtttttactacaaggacttg

SEQ ID NO: 1041918 - DNA, 120 bp, Artificial Sequence
  ENSG00000238102_11 (sequence is synthesized)
gctctgtattaacaatgtcatccttcttagaaattgataactatagaagttatcctatgtggagtaagataagaatgactgctcttcatgtttacaagagattagagtggataagaacca

SEQ ID NO: 1041919 - DNA, 120 bp, Artificial Sequence
  ENSG00000238102_12 (sequence is synthesized)
ggtgaaacaggaatcccaagggatctccttccttctcagagtcatagccattccagggaatctgcacattttctggctttcccatttctatcagatggttacttaggaacaaatgaaaat

SEQ ID NO: 1041920 - DNA, 120 bp, Artificial Sequence
  ENSG00000238102_13 (sequence is synthesized)
cagcaaaagtgccatgataattatcacaaattcgtatgaaataatgaggcagttgaatgcattttttctgtcttatctctgtttgtcaatgagctaaacagtgtgttcaggtccctctga

SEQ ID NO: 1041921 - DNA, 120 bp, Artificial Sequence
  ENSG00000238102_14 (sequence is synthesized)
atacttggaggagcaagattctttagccttgtctcactgattcccaaagtttatctaagtctttccagaggaggacctctattgtcaacacttgatagccaaacccttcctttgtttttt

SEQ ID NO: 1041922 - DNA, 120 bp, Artificial Sequence
  ENSG00000238102_15 (sequence is synthesized)
tccttctatacactacttgttaatcaacttgcacaaaaccaatttctggttcaactttgtcctgagctgctaactggctatgactttattttacaggtgcagtaactttgttagctgtta

SEQ ID NO: 1041923 - DNA, 120 bp, Artificial Sequence
  ENSG00000238102_16 (sequence is synthesized)
ttttgaggagctccagccatgggctcatttgatagatttaattgccaacatcttgaacaaaccccttgattttaaaattttaatttagcatgtttaacatgaaagaggattgccgaataa

SEQ ID NO: 1041924 - DNA, 120 bp, Artificial Sequence
  ENSG00000287150_0 (sequence is synthesized)
actgaggagttaatgaaaatttcaatgaagagttgaacaaagaagggaaccctacaggggataataaaatcaccatcatgaagaagccgtctcatgagaaaacgcactatgtgaactccc

SEQ ID NO: 1041925 - DNA, 120 bp, Artificial Sequence
  ENSG00000287150_1 (sequence is synthesized)
aacactgctgaagagtcaccacctctagtttgtcagataagctcttcagatggccagttgtccccttcaggatcctgggatgggaccatgtacgtctagcaatataaaactggtactggc

SEQ ID NO: 1041926 - DNA, 120 bp, Artificial Sequence
  ENSG00000287150_2 (sequence is synthesized)
attaccagcaggtgcccttctgaaaaccactggaatgtctctggctcctaaaataagataattaggtagtagagtgccctgggatgtggatgcttacctttcagaactagacttgggttc

SEQ ID NO: 1041927 - DNA, 120 bp, Artificial Sequence
  ENSG00000287150_3 (sequence is synthesized)
attctcacctgactgcctcagccacctaggaaacatgacccaggtgaccattatctcagaggcttctgtcgggcctctgcaggaataaatgcaggctattctctaggcaatcaatgagaa

SEQ ID NO: 1041928 - DNA, 120 bp, Artificial Sequence
  ENSG00000287150_4 (sequence is synthesized)
agtcgaggacccaattgaagaaataacaagcagtcatgccaggaatacatcccaaaccacaaccctgtcttgtacatggacactcagacagtttgcttgctctaggaggtagcagggaga

SEQ ID NO: 1041929 - DNA, 120 bp, Artificial Sequence
  ENSG00000287150_5 (sequence is synthesized)
agcctccaaaaagaacttatctggccacagcctaagaaaggaagaaattaagttttaaaaaagaaacttttctccatccatgtaacgtagcttatttgtaaatatctagaagaaacaact

SEQ ID NO: 1041930 - DNA, 120 bp, Artificial Sequence
  ENSG00000287150_6 (sequence is synthesized)
gtaaaaatacatgtcttggtcattgccacagaagaataaggtagagaacaaacatctttaatttaatgaggacacaacccgtctagacaatcaagctcctaaagaataagaggtctagtg

SEQ ID NO: 1041931 - DNA, 120 bp, Artificial Sequence
  ENSG00000287150_7 (sequence is synthesized)
ggtaactaacacaagtgtttaaatagcttaaactagaccttaatatttacataatggcttcaatcctttgctttccagccacgctgtgaatgtttttgaattggggaaattcttcattca

SEQ ID NO: 1041932 - DNA, 120 bp, Artificial Sequence
  ENSG00000182873_0 (sequence is synthesized)
gtcgagctgagaaatgccagtgtcggccatgctggccacatgtgggacggagcaggatccccagccacccatgcgaggccacccccttccttgggggggtccttgttcagaggggcaccg

SEQ ID NO: 1041933 - DNA, 120 bp, Artificial Sequence
  ENSG00000182873_1 (sequence is synthesized)
acaactaactggctgaacaagccgtctcatgacgtcttggaaccctgaccataaaggtgtaggacctggccacagcaccctgcctgcgctggcactgcacagacccgtctgtcaggagcc

SEQ ID NO: 1041934 - DNA, 120 bp, Artificial Sequence
  ENSG00000182873_2 (sequence is synthesized)
atccaggcatcgacttcagaatctcaggtgctgcttggcaggaaaatgcccagcaggcgggcctgggactcggtgatgcgcctgtgccggggagggcagaacgctggtgcctggcacagg

SEQ ID NO: 1041935 - DNA, 120 bp, Artificial Sequence
  ENSG00000182873_3 (sequence is synthesized)
tgccacaacacatacggtgtttgggcgccatcttggaagcagagatcaggcctcaccagacaccaagcctgctggcaccatgaccctggactcccaacctccacagctgggaaagaactc

SEQ ID NO: 1041936 - DNA, 120 bp, Artificial Sequence
  ENSG00000182873_4 (sequence is synthesized)
tgctccctagaaattacccaggctcgctcagcccaccctcgcacactcattcactggcccgccccttaggtgtgtgctcctgtaccaacactgaaatccagctgtcacaacaggcaccca

SEQ ID NO: 1041937 - DNA, 120 bp, Artificial Sequence
  ENSG00000182873_5 (sequence is synthesized)
gtgagaaactcattccccagagcaacagtgtagagaggtggaacctgatgggagccccgccctcacagacaaactcctgtagctgtcaagacagcttgggcatggattcctctctgcctt

SEQ ID NO: 1041938 - DNA, 120 bp, Artificial Sequence
  ENSG00000182873_6 (sequence is synthesized)
tgtcacggcgcgctgctcccttcggtgccagccaggatggggccgggtgggtgcagctggtgaaaagaaatgcagccccccagcccctgcagaccaagccgaacagcccagctcgcgggt

SEQ ID NO: 1041939 - DNA, 120 bp, Artificial Sequence
  ENSG00000182873_7 (sequence is synthesized)
ggatcacagggcacccagcagccgccttccctccggaagagccaagaaggcttccaagaccagaaatgcccccagtgtggctgtgcctgtccccggtgccccgccagctggggggcagca

SEQ ID NO: 1041940 - DNA, 120 bp, Artificial Sequence
  ENSG00000182873_8 (sequence is synthesized)
aggaccctccagtcgttcaagctggaattggcaggtttctgcctgtataggcatcggcttcagagtctcaggtgctgcttggcaggaaaatgcagggcaggaggggctgggcctcagctc

SEQ ID NO: 1041941 - DNA, 120 bp, Artificial Sequence
  ENSG00000182873_9 (sequence is synthesized)
gaggctcccaggtgcagccccccactccactgcagggcccaggggggccaagaacagccacaacaacaacaaaagccaaactgggaacggaatcgtggaaaaaaccctcataggcttttg

SEQ ID NO: 1041942 - DNA, 120 bp, Artificial Sequence
  ENSG00000182873_10 (sequence is synthesized)
ggaacttacaaagaaatgcccacatccattctactaacatggcatctactaacgtggcatctactaggatgccacaaaacagacaaatccttccacgtaaggctggacacgtgtcagggc

SEQ ID NO: 1041943 - DNA, 120 bp, Artificial Sequence
  ENSG00000182873_11 (sequence is synthesized)
ggtgtctcaaagctgggccacaggcagcatccacggccaggccactgggtggaggagacggtgctggggaggagccggagggaggggccggggctgttcccttaggcagaacggctcacc

SEQ ID NO: 1041944 - DNA, 120 bp, Artificial Sequence
  ENSG00000182873_12 (sequence is synthesized)
tgtggtgtgcgcacagcaggattgtggggacacaagatgcccccttcattcatcagttacttgtattctttgtatgaaacacctgccgataaaatgtgaaaaaggggcatttcctaaagt

SEQ ID NO: 1041945 - DNA, 120 bp, Artificial Sequence
  ENSG00000287854_0 (sequence is synthesized)
tggttgagcactgtgatggggggaagtggctgactgtgtgtctcattggctggctgcttcctgatggggctgcatcaagtctcccatttccactttggctaagagtttgctgagggccac

SEQ ID NO: 1041946 - DNA, 120 bp, Artificial Sequence
  ENSG00000287854_1 (sequence is synthesized)
cagtttgcaacttctgcctgaaaggaaagtagaacttggctggaagacagaattatgaagagaccagatatagagtgagaaagaaaaaaaaaagtacatcctttgggctgagctatttct

SEQ ID NO: 1041947 - DNA, 120 bp, Artificial Sequence
  ENSG00000287854_2 (sequence is synthesized)
taattgattccatattatcagcccctggaccttctcaaagctgccatgttttccacacttgagtaggagatttgtcctcaggcacagaatttctgggccagttcttgctaaaatgtcaca

SEQ ID NO: 1041948 - DNA, 120 bp, Artificial Sequence
  ENSG00000287854_3 (sequence is synthesized)
gttttcatagttataattcatcacactcaagcacccatggaaacaattgtccacaacatgaactcagagatccaaagtaaaaatgtttttctctgccataataaacatctccttgtggaa

SEQ ID NO: 1041949 - DNA, 120 bp, Artificial Sequence
  ENSG00000287855_0 (sequence is synthesized)
gtcctggcgacagccggtgtgtgaaaagcctgtttcctcccctagaaaaagcacgtttggctccgctctccactgacacgtttttagctgagtgacgatggaagccgctggcttttaaca

SEQ ID NO: 1041950 - DNA, 120 bp, Artificial Sequence
  ENSG00000287855_1 (sequence is synthesized)
gacggtcttaacgagcctctgctccccggcgaccagcagacgcgggctgacccacggttttacacaccacgtctgcgtggcggcggccgggcggccccacggggcccgggcaggaggtga

SEQ ID NO: 1041951 - DNA, 120 bp, Artificial Sequence
  ENSG00000287855_2 (sequence is synthesized)
cggcagcgtttctcgccgcctttgctcagcgcgcctctcatcccctctctcctgtcgactcgcggcttcctgcagaccctcggcctgtctgcggcccctcgcccgcagcctccccagcag

SEQ ID NO: 1041952 - DNA, 120 bp, Artificial Sequence
  ENSG00000287855_3 (sequence is synthesized)
ccgaggtttcctatagcattaaaagcaggaaagaaccagccctgctccccaggaactgaacttctgtggctcatcttcagagaagccactgttgagtggggctcctcgggggtgctccag

SEQ ID NO: 1041953 - DNA, 120 bp, Artificial Sequence
  ENSG00000287855_4 (sequence is synthesized)
ctgcggtttaatttgcaggccccagtcgcagaatttaagaggacagaagaatggtcttttgttcccaacagcctccttcaccaccacaaccccactggctgcctcaccttacgtgtgaca

SEQ ID NO: 1041954 - DNA, 120 bp, Artificial Sequence
  ENSG00000287855_5 (sequence is synthesized)
cgctcgtcgaacttgccagcaaacccgggaggaattgcattaaacctgtccatcaatctggaaggacctgtcatctccacgttgttgtatcttccaacccacgaacgcggccgtgtctct

SEQ ID NO: 1041955 - DNA, 120 bp, Artificial Sequence
  ENSG00000287855_6 (sequence is synthesized)
aggtgtgtgctgacgtctttcagcagcattgctgagttttcagcattgcccagcgcttccagcaccatgccggatccgatggttagagcagacgtcctttcttgttccggatctgaatgg

SEQ ID NO: 1041956 - DNA, 120 bp, Artificial Sequence
  ENSG00000287855_7 (sequence is synthesized)
ttgccctcgaggagaatgctggctgcagggcttgtacagatgctctttatccagcggaggaagttcctctccttctctgtttttccaagtttaaatcatgaatagatgttaaacttgtca

SEQ ID NO: 1041957 - DNA, 120 bp, Artificial Sequence
  ENSG00000287855_8 (sequence is synthesized)
cgggccttcccaacactgacagatgtgatcgtgtgagttatcttcggtagctggtaacgtgtggatctcatcgactgattctcaaatacggaaccaaccttcatccctggaataatccct

SEQ ID NO: 1041958 - DNA, 120 bp, Artificial Sequence
  ENSG00000287855_9 (sequence is synthesized)
ctcaaatacggaaccaaccttcatccctggaataatccctacttggtcatggcatagaattctttgttatatattggcaaattctatttagtaattttttttttttttttgaggcagagt

SEQ ID NO: 1041959 - DNA, 83 bp, Artificial Sequence
  ENSG00000287855_10 (sequence is synthesized)
ggctggagtgcagtggcaccatctctgcttactgcaacctccacctgccgagtagttgggattataggcagaagatggggttt

SEQ ID NO: 1041960 - DNA, 120 bp, Artificial Sequence
  ENSG00000287855_11 (sequence is synthesized)
aaagtgttgggattacaagtgtgagccattgtgcccagtctatttagtaatattttgttaaaaaattttgtgtctatatcactgagggatattggcttgtaatattattttcttgtatta

SEQ ID NO: 1041961 - DNA, 120 bp, Artificial Sequence
  ENSG00000287855_12 (sequence is synthesized)
actgagggatattggcttgtaatattattttcttgtattatctttgtgtggttttggtatcagagaaccactagcttcataaaataaattgaggctgggtacagtggctcatgcttgtaa

SEQ ID NO: 1041962 - DNA, 120 bp, Artificial Sequence
  ENSG00000287855_13 (sequence is synthesized)
ctttgggaggctgaggtgggaggactgcctgagcccaggagtttgggaccagccagggcaccatggcaagatcctgtctctacaaaaactaaaaaaattagtgaggcgtggtggtgtggg

SEQ ID NO: 1041963 - DNA, 88 bp, Artificial Sequence
  ENSG00000287855_14 (sequence is synthesized)
tggtggtgtggcgggaggataatttgagctgaggaggtcgaggctacagtgagccatgtttgtgccattgcactccagcctgggtgac
